(19) United States
(12) Patent Application Publication
(10) Pub. No.: US 2022/0259612 A1
(43) Pub. Date: Aug. 18, 2022

(54) METHODS AND COMPOSITIONS FOR MODIFYING CYTOKININ OXIDASE LEVELS IN PLANTS

(71) Applicants: Pairwise Plants Services, Inc., Durtham, NC (US); Monsanto Technology LLC, St. Louis, MO (US)

(72) Inventors: Lolita George Mathew, Cary, NC (US); Shunhong Dai, St. Louis, MO (US); Huachun Larue, St. Louis, MO (US); Benjamin Julius, St. Louis, MO (US); Brent Delbert Brower-Toland, St. Louis, MO (US); Thomas L. Slewinski, St. Louis, MO (US); HaeJin Kim, Durham, NC (US)

(21) Appl. No.: 17/668,570

(22) Filed: Feb. 10, 2022

Related U.S. Application Data
(60) Provisional application No. 63/148,439, filed on Feb. 11, 2021.

(51) Int. Cl. C12N 15/82; C07K 14/415; C12N 9/22; C12N 15/113

(52) U.S. Cl. CPC C12N 15/8261; C07K 14/415; C12N 2310/20; C12N 9/22; C12N 15/113; C12N 15/8213

(57) ABSTRACT

This invention relates to compositions and methods for improving/enhancing yield traits by modifying cytokinin oxidase (CKX) levels in a plant. The invention further relates to plants produced using the methods and compositions of the invention.

### STATEMENT OF PRIORITY

[0001] This application claims the benefit, under 35 U.S.C. § 119 (e), of U.S. Provisional Application No. 63/148,439 filed on Feb. 11, 2021, the entire contents of which is incorporated by reference herein.

### STATEMENT REGARDING ELECTRONIC FILING OF A SEQUENCE LISTING

[0002] A Sequence Listing in ASCII text format, submitted under 37 C.F.R. § 1.821, entitled 1499.48_ST25.txt, 1,990,037 bytes in size, generated on Feb. 5, 2022 and filed via EFS-Web, is provided in lieu of a paper copy. This Sequence Listing is hereby incorporated herein by reference into the specification for its disclosures.

### FIELD OF THE INVENTION

[0003] This invention relates to compositions and methods for improving or enhancing yield traits by modifying cytokinin oxidase (CKX) levels in a plant. The invention further relates to plants produced using the methods and compositions of the invention.

### BACKGROUND OF THE INVENTION

[0004] Soybean is a key component of global food security providing high protein animal feed and over half of the world's oilseed production. With a growing population to feed, there is continuous need to increase the crop yields. Currently, key staple crops, including soybean, increase yield only by 0.9-1.6% per year and this magnitude of yield increase is not enough to meet the future needs in food production. The present invention addresses these shortcomings in the art by providing new compositions and methods for improving/enhancing yield traits in plants including soybean.

### SUMMARY OF THE INVENTION

[0005] One aspect of the invention provides a plant or plant part thereof comprising at least one non-natural mutation in at least one endogenous Cytokinin Oxidase/Dehydrogenase (CKX) gene encoding a CKX protein.

[0006] Another aspect of the invention provides a plant cell comprising an editing system, the editing system comprising (a) a CRISPR-associated effector protein; and (b) a guide nucleic acid (gRNA, gDNA, crRNA, crDNA, sgRNA, sgDNA) comprising a spacer sequence with complementarity to an endogenous target gene encoding a CKX protein in the plant cell.

[0007] A further aspect of the invention provides a plant cell comprising at least one non-natural mutation within an endogenous Cytokinin Oxidase/Dehydrogenase (CKX) gene that results in a neo-allele with altered level of expression or a null allele or knockout of the CKX gene, wherein the at least one non-natural mutation is a base substitution, base insertion or a base deletion that is introduced using an editing system that comprises a nucleic acid binding domain that binds to a target site in the CKX gene.

[0008] Also provided is a method of providing a plurality of plants having improved yield traits, the method comprising planting two or more plants of the invention in a growing area, thereby providing a plurality of plants having at least one improved yield trait(s) as compared to a plurality of control plants not comprising the at least one non-natural mutation.

[0009] The invention further provides a method of producing/breeding a transgene-free genome-edited plant, comprising: (a) crossing a plant of the invention with a transgene free plant, thereby introducing the mutation into the plant that is transgene-free; and (b) selecting a progeny plant that comprises the mutation but is transgene-free, thereby producing a transgene free genome-edited plant.

[0010] Another aspect of the invention provides a method for editing a specific site in the genome of a plant cell, the method comprising: cleaving, in a site-specific manner, a target site within an endogenous Cytokinin Oxidase/Dehydrogenase (CKX) gene in the plant cell, wherein the endogenous CKX gene (a) comprises a sequence having at least 80% sequence identity to any one of the nucleotide sequences of SEQ ID NOs:72, 73, 75, 76, 78, 79, 81, 82, 84, 87, 88, or 91; (b) comprises a region having at least 80% sequence identity to any one of the nucleotide sequences of SEQ ID NOs:93-98; and/or (c) encodes a polypeptide having at least 80% sequence identity to any one of the amino acid sequences of SEQ ID NOs:74, 77, 80, 83, 89, or 92, thereby generating an edit in the endogenous CKX gene of the plant cell and producing a plant cell comprising an edit in the endogenous CKX gene.

[0011] An additional aspect of the invention provides a method for making a plant, comprising: (a) contacting a population of plant cells comprising at least one endogenous Cytokinin Oxidase/Dehydrogenase (CKX) gene with a nuclease targeted to the endogenous CKX gene, wherein the nuclease is linked to a nucleic acid binding domain (e.g., DNA binding domain) (e.g., an editing system) that binds to a target site in the at least one endogenous CKX gene, wherein the at least one endogenous CKX gene (i) comprises a sequence having at least 80% sequence identity to any one of the nucleotide sequences of SEQ ID NOs:72, 73, 75, 76, 78, 79, 81, 82, 84, 87, 88, or 91; (ii) comprises a region having at least 80% sequence identity to any one of the nucleotide sequences of SEQ ID NOs:93-98; and/or (iii) encodes a polypeptide having at least 80% identity to any one of the amino acid sequences of SEQ ID NOs: 74, 77, 80, 83, 89, or 92; (b) selecting from the population a plant cell that comprises a mutation in the at least one endogenous CKX gene, wherein the mutation is a substitution and/or a deletion; and (c) growing the selected plant cell into a plant comprising the mutation in the at least one endogenous CKX gene.

[0012] In an additional aspect, a method improving yield traits in a plant or part thereof, comprising (a) contacting a plant cell comprising an endogenous Cytokinin Oxidase/Dehydrogenase (CKX) gene with a nuclease targeting the endogenous CKX gene, wherein the nuclease is linked to a nucleic acid binding domain (e.g., a DNA binding domain) that binds to a target site in the endogenous CKX gene, wherein the endogenous CKX gene: (i) comprises a sequence having at least 80% sequence identity to any one of the nucleotide sequences of SEQ ID NOs:72, 73, 75, 76, 78, 79, 81, 82, 84, 87, 88, or 91; (ii) comprises a region having at least 80% sequence identity to any one of the nucleotide sequences of SEQ ID NOs:93-98; and/or (iii) encodes a polypeptide having at least 80% identity to any one of the amino acid sequences of SEQ ID NOs: 74, 77, 80, 83, 89, or 92; and (b) growing the plant cell into a plant comprising the mutation in the endogenous CKX gene, thereby improving yield traits (e.g., increased seed number, increased seed size; increased pod number; increased yield or improved yield traits under increased planting density) in the plant or part thereof.

[0013] In another aspect, a method is provided for producing a plant or part thereof comprising at least one cell having a mutation in an endogenous Cytokinin Oxidase/Dehydrogenase (CKX) gene, the method comprising contacting a target site in the endogenous CKX gene in the plant or plant part with a nuclease comprising a cleavage domain and a nucleic acid binding domain (e.g., a DNA binding domain), wherein the nucleic acid binding domain of the nuclease binds to a target site in the endogenous CKX gene, the endogenous CKX gene: (a) comprising a sequence having at least 80% sequence identity to any one of the nucleotide sequences of SEQ ID NOs:72, 73, 75, 76, 78, 79, 81, 82, 84, 87, 88, or 91; (b) comprising a region having at least 80% sequence identity to any one of the nucleotide sequences of SEQ ID NOs:93-98; and/or (c) encoding a polypeptide having at least 80% identity to any one of the amino acid sequences of SEQ ID NOs: 74, 77, 80, 83, 89, or 92, thereby producing the plant or part thereof comprising at least one cell having a mutation in the endogenous CKX gene.

[0014] In a further aspect, a method of producing a plant or part thereof comprising a mutation in an endogenous Cytokinin Oxidase/Dehydrogenase (CKX) gene and improved yield traits, the method comprising contacting a target site in an endogenous CKX gene in the plant or plant part with a nuclease comprising a cleavage domain and a nucleic acid binding domain (e.g., a DNA binding domain), wherein the nucleic acid binding domain binds to a target site in the endogenous CKX gene, the endogenous CKX gene: (a) comprising a sequence having at least 80% sequence identity to any one of the nucleotide sequences of SEQ ID NOs:72, 73, 75, 76, 78, 79, 81, 82, 84, 87, 88, or 91; (b) comprising a region having at least 80% sequence identity to any one of the nucleotide sequences of SEQ ID NOs:93-98; and/or (c) encoding a polypeptide having at least 80% identity to any one of the amino acid sequences of SEQ ID NOs: 74, 77, 80, 83, 89, or 92, thereby producing the plant or part thereof comprising a mutation in the endogenous CKX gene and exhibiting improved yield traits.

[0015] An additional aspect of the invention provides a guide nucleic acid that that binds to a target site in a Cytokinin Oxidase/Dehydrogenase (CKX) gene, the CKX gene: (a) comprising a sequence having at least 80% sequence identity to any one of the nucleotide sequences of SEQ ID NOs:72, 73, 75, 76, 78, 79, 81, 82, 84, 87, 88, or 91; (b) comprising a region having at least 80% sequence identity to any one of the nucleotide sequences of SEQ ID NOs:93-98; and/or (c) encoding a polypeptide having at least 80% identity to any one of the amino acid sequences of SEQ ID NOs: 74, 77, 80, 83, 89, or 92.

[0016] A further aspect of the invention provides a system comprising a guide nucleic acid of the invention and a CRISPR-Cas effector protein that associates with the guide nucleic acid.

[0017] Another aspect of the invention provides gene editing system comprising a CRISPR-Cas effector protein in association with a guide nucleic acid, wherein the guide nucleic acid comprises a spacer sequence that is complementary to and binds to a Cytokinin Oxidase/Dehydrogenase (CKX) gene.

[0018] An additional aspect of the invention provides a complex comprising a CRISPR-Cas effector protein comprising a cleavage domain and a guide nucleic acid, wherein the guide nucleic acid binds to a target site in an endogenous Cytokinin Oxidase/Dehydrogenase (CKX) gene, wherein the CKX gene: (a) comprises a sequence having at least 80% sequence identity to any one of the nucleotide sequences of SEQ ID NOs:72, 73, 75, 76, 78, 79, 81, 82, 84, 87, 88, or 91; (b) comprises a region having at least 80% sequence identity to any one of the nucleotide sequences of SEQ ID NOs:93-98; and/or (c) encodes a polypeptide having at least 80% sequence identity to any one of the amino acid sequences of SEQ ID NOs:74, 77, 80, 83, 89, or 92, wherein the cleavage domain cleaves a target strand in the CKX gene.

[0019] An further aspect provides an expression cassette comprising ((a) a polynucleotide encoding CRISPR-Cas effector protein comprising a cleavage domain and (b) a guide nucleic acid that binds to a target site in an endogenous Cytokinin Oxidase/Dehydrogenase (CKX) gene, wherein the guide nucleic acid comprises a spacer sequence that is complementary to and binds to a portion of the endogenous CKX gene, the endogenous CKX gene having at least 80% sequence identity to any one of the nucleotide sequences of SEQ ID NOs:72, 73, 75, 76, 78, 79, 81, 82, 84, 87, 88, or 91 or encoding a sequence having at least 80% sequence identity to any one of the amino acid sequences of SEQ ID NOs:74, 77, 80, 83, 89, or 92, optionally wherein the spacer sequence is complementary to and binds to a portion of the endogenous CKX gene having at least 80% sequence identity to any one of the nucleotide sequences of SEQ ID NOs:93-98.

[0020] Another aspect of the invention provides a nucleic acid comprising a mutated Cytokinin Oxidase/Dehydrogenase (CKX) gene, wherein the mutated CKX gene produces a truncated CKX protein or no protein.

[0021] Further provided are plants comprising in their genome one or more Cytokinin Oxidase/Dehydrogenase (CKX) genes having a non-natural mutation produced by the methods of the invention as well as polypeptides, polynucleotides, nucleic acid constructs, expression cassettes and vectors for making a plant of this invention.

[0022] These and other aspects of the invention are set forth in more detail in the description of the invention below.

### BRIEF DESCRIPTION OF THE SEQUENCES

[0023] SEQ ID NOs:1-17 are exemplary Cas12a amino acid sequences useful with this invention.

[0024] SEQ ID NOs:18-20 are exemplary Cas12a nucleotide sequences useful with this invention.

[0025] SEQ ID NO:21-22 are exemplary regulatory sequences encoding a promoter and intron.

[0026] SEQ ID NOs:23-29 are exemplary cytosine deaminase sequences useful with this invention.

[0027] SEQ ID NOs:30-40 are exemplary adenine deaminase amino acid sequences useful with this invention.

[0028] SEQ ID NO:41 is an exemplary uracil-DNA glycosylase inhibitor (UGI) sequences useful with this invention.

[0029] SEQ ID NOs:42-44 provides an example of a protospacer adjacent motif position for a Type V CRISPR-Cas12a nuclease.

[0030] SEQ ID NOs:45-47 provide example peptide tags and affinity polypeptides useful with this invention.

[0031] SEQ ID NOs:48-58 provide example RNA recruiting motifs and corresponding affinity polypeptides useful with this invention.

[0032] SEQ ID NOs:59-60 are example Cas9 polypeptide sequences useful with this invention.

[0033] SEQ ID NOs:61-71 are example Cas9 polynucleotide sequences useful with this invention.

[0034] SEQ ID NOs: 72, 75, 78, 81, 84, 87, or 90 are example CKX genomic sequences (CKX1, CKX2, CKX3, CKX4, CKX5, CKX6, and CKX5, respectively).

[0035] SEQ ID NOs:73, 76, 79, 82, 85, 88 or 91 are example CKX coding (cds) sequences (CKX1, CKX2, CKX3, CKX4, CKX5, CKX6, and CKX5, respectively).

[0036] SEQ ID NOs:74, 77, 80, 83, 86, 89, or 92 are example CKX polypeptide sequences (CKX1, CKX2, CKX3, CKX4, CKX5, CKX6, and CKX5, respectively).

[0037] SEQ ID NOs:92-98 are example nucleic acid sequences (regions) from CKX polynucleotides (example regions (e.g., example target sites) from CKX1, CKX2, CKX3, CKX4, CKX5, CKX6, and CKX5, respectively).

[0038] SEQ ID NOs:99-101 are example spacer sequences for a CKX1 gene.

[0039] SEQ ID NOs:102-104 are example spacer sequences for a CKX2 gene.

[0040] SEQ ID NOs:105-107 are example spacer sequences for a CKX3 gene.

[0041] SEQ ID NO:108 and SEQ ID NO:109 are example spacer sequences for a CKX4 gene.

[0042] SEQ ID NO:110 and SEQ ID NO:111 are example spacer sequences for a CKX5 gene.

[0043] SEQ ID NO:112 and SEQ ID NO:113 are example spacer sequences for a CKX6 gene.

[0044] SEQ ID NOs:114-284 are example edited sequences.

### DETAILED DESCRIPTION

[0045] The present invention now will be described hereinafter with reference to the examples, in which embodiments of the invention are shown. This description is not intended to be a detailed catalog of all the different ways in which the invention may be implemented, or all the features that may be added to the instant invention. For example, features illustrated with respect to one embodiment may be incorporated into other embodiments, and features illustrated with respect to a particular embodiment may be deleted from that embodiment. Thus, the invention contemplates that in some embodiments of the invention, any feature or combination of features set forth herein can be excluded or omitted. In addition, numerous variations and additions to the various embodiments suggested herein will be apparent to those skilled in the art in light of the instant disclosure, which do not depart from the instant invention. Hence, the following descriptions are intended to illustrate some particular embodiments of the invention, and not to exhaustively specify all permutations, combinations and variations thereof.

[0046] Unless otherwise defined, all technical and scientific terms used herein have the same meaning as commonly understood by one of ordinary skill in the art to which this invention belongs. The terminology used in the description of the invention herein is for the purpose of describing particular embodiments only and is not intended to be limiting of the invention.

[0047] All publications, patent applications, patents and other references cited herein are incorporated by reference in their entireties for the teachings relevant to the sentence and/or paragraph in which the reference is presented.

[0048] Unless the context indicates otherwise, it is specifically intended that the various features of the invention described herein can be used in any combination. Moreover, the present invention also contemplates that in some embodiments of the invention, any feature or combination of features set forth herein can be excluded or omitted. To illustrate, if the specification states that a composition comprises components A, B and C, it is specifically intended that any of A, B or C, or a combination thereof, can be omitted and disclaimed singularly or in any combination.

[0049] As used in the description of the invention and the appended claims, the singular forms “a,” “an” and “the” are intended to include the plural forms as well, unless the context clearly indicates otherwise.

[0050] Also as used herein, “and/or” refers to and encompasses any and all possible combinations of one or more of the associated listed items, as well as the lack of combinations when interpreted in the alternative (“or”).

[0051] The term “about,” as used herein when referring to a measurable value such as an amount or concentration and the like, is meant to encompass variations of ±10%, ±5%, ±1%, ±0.5%, or even ±0.1% of the specified value as well as the specified value. For example, “about X” where X is the measurable value, is meant to include X as well as variations of ±10%, ±5%, ±1%, ±0.5%, or even ±0.1% of X. A range provided herein for a measurable value may include any other range and/or individual value therein.

[0052] As used herein, phrases such as “between X and Y” and “between about X and Y” should be interpreted to include X and Y. As used herein, phrases such as “between about X and Y” mean “between about X and about Y” and phrases such as “from about X to Y” mean “from about X to about Y.”

[0053] Recitation of ranges of values herein are merely intended to serve as a shorthand method of referring individually to each separate value falling within the range, unless otherwise indicated herein, and each separate value is incorporated into the specification as if it were individually recited herein. For example, if the range 10 to 15 is disclosed, then 11, 12, 13, and 14 are also disclosed.

[0054] The term “comprise,” “comprises” and “comprising” as used herein, specify the presence of the stated features, integers, steps, operations, elements, and/or components, but do not preclude the presence or addition of one or more other features, integers, steps, operations, elements, components, and/or groups thereof.

[0055] As used herein, the transitional phrase “consisting essentially of” means that the scope of a claim is to be interpreted to encompass the specified materials or steps recited in the claim and those that do not materially affect the basic and novel characteristic(s) of the claimed invention. Thus, the term “consisting essentially of” when used in a claim of this invention is not intended to be interpreted to be equivalent to “comprising.”

[0056] As used herein, the terms “increase,” “increasing,” “increased,” “enhance,” “enhanced,” “enhancing,” and “enhancement” (and grammatical variations thereof) describe an elevation of at least about 15%, 20%, 25%, 50%, 75%, 100%, 150%, 200%, 300%, 400%, 500% or more as compared to a control.

[0057] As used herein, the terms “reduce,” “reduced,” “reducing,” “reduction,” “diminish,” and “decrease” (and grammatical variations thereof), describe, for example, a decrease of at least about 5%, 10%, 15%, 20%, 25%, 35%, 50%, 75%, 80%, 85%, 90%, 95%, 96%, 97%, 98%, 99%, 99.5%, 99.6%, 99.7%, 99.8%, 99.9%, or 100% as compared to a control. In some embodiments, the reduction can result in no or essentially no (i.e., an insignificant amount, e.g., less than about 10% or even 5%) detectable activity or amount.

[0058] As used herein, the terms “express,” “expresses,” “expressed” or “expression,” and the like, with respect to a nucleic acid molecule and/or a nucleotide sequence (e.g., RNA or DNA) indicates that the nucleic acid molecule and/or a nucleotide sequence is transcribed and, optionally, translated. Thus, a nucleic acid molecule and/or a nucleotide sequence may express a polypeptide of interest or, for example, a functional untranslated RNA.

[0059] A “heterologous” or a “recombinant” nucleotide sequence is a nucleotide sequence not naturally associated with a host cell into which it is introduced, including non-naturally occurring multiple copies of a naturally occurring nucleotide sequence.

[0060] A “native” or “wild type” nucleic acid, nucleotide sequence, polypeptide or amino acid sequence refers to a naturally occurring or endogenous nucleic acid, nucleotide sequence, polypeptide or amino acid sequence. Thus, for example, a “wild type mRNA” is an mRNA that is naturally occurring in or endogenous to the reference organism.

[0061] As used herein, the term “heterozygous” refers to a genetic status wherein different alleles reside at corresponding loci on homologous chromosomes.

[0062] As used herein, the term “homozygous” refers to a genetic status wherein identical alleles reside at corresponding loci on homologous chromosomes.

[0063] As used herein, the term “allele” refers to one of two or more different nucleotides or nucleotide sequences that occur at a specific locus.

[0064] A “null allele” is a nonfunctional allele caused by a genetic mutation that results in a complete lack of production of the corresponding protein or produces a protein that is non-functional.

[0065] A “recessive mutation” is a mutation in a gene that produces a phenotype when homozygous but the phenotype is not observable when the locus is heterozygous.

[0066] A “dominant negative mutation” is a mutation that produces an altered gene product (e.g., having an aberrant function relative to wild type), which gene product adversely affects the function of the wild-type allele or gene product. For example, a “dominant negative mutation” may block a function of the wild type gene product. A dominant negative mutation may also be referred to as an “antimorphic mutation.”

[0067] A “semi-dominant mutation” refers to a mutation in which the penetrance of the phenotype in a heterozygous organism is less than that observed for a homozygous organism.

[0068] A “weak loss-of-function mutation” is a mutation that results in a gene product having partial function or reduced function (partially inactivated) as compared to the wild type gene product.

[0069] A “hypomorphic mutation” is a mutation that results in a partial loss of gene function, which may occur through reduced expression (e.g., reduced protein and/or reduced RNA) or reduced functional performance (e.g., reduced activity), but not a complete loss of function/activity. A “hypomorphic” allele is a semi-functional allele caused by a genetic mutation that results in production of the corresponding protein that functions at anywhere between 1% and 99% of normal efficiency.

[0070] A “hypermorphic mutation” is a mutation that results in increased expression of the gene product and/or increased activity of the gene product.

[0071] A “locus” is a position on a chromosome where a gene or marker or allele is located. In some embodiments, a locus may encompass one or more nucleotides.

[0072] As used herein, the terms “desired allele,” “target allele” and/or “allele of interest” are used interchangeably to refer to an allele associated with a desired trait. In some embodiments, a desired allele may be associated with either an increase or a decrease (relative to a control) of or in a given trait, depending on the nature of the desired phenotype.—In some embodiments of this invention, the phrase “desired allele,” “target allele” or “allele of interest” refers to an allele(s) that is associated with increased yield under non-water stress conditions in a plant relative to a control plant not having the target allele or alleles.

[0073] A marker is “associated with” a trait when said trait is linked to it and when the presence of the marker is an indicator of whether and/or to what extent the desired trait or trait form will occur in a plant/germplasm comprising the marker. Similarly, a marker is “associated with” an allele or chromosome interval when it is linked to it and when the presence of the marker is an indicator of whether the allele or chromosome interval is present in a plant/germplasm comprising the marker.

[0074] As used herein, the terms “backcross” and “backcrossing” refer to the process whereby a progeny plant is crossed back to one of its parents one or more times (e.g., 1, 2, 3, 4, 5, 6, 7, 8, etc.). In a backcrossing scheme, the “donor” parent refers to the parental plant with the desired gene or locus to be introgressed. The “recipient” parent (used one or more times) or “recurrent” parent (used two or more times) refers to the parental plant into which the gene or locus is being introgressed. For example, see Ragot, M. et al. Marker-assisted Backcrossing: A Practical Example, in TECHNIQUES ET UTILISATIONS DES MARQUEURS MOLECULAIRES LES COLLOQUES, Vol. 72, pp. 45-56 (1995); and Openshaw et al., Marker-assisted Selection in Backcross Breeding, in PROCEEDINGS OF THE SYMPOSIUM “ANALYSIS OF MOLECULAR MARKER DATA,” pp. 41-43 (1994). The initial cross gives rise to the F1 generation. The term “BC1” refers to the second use of the recurrent parent, “BC2” refers to the third use of the recurrent parent, and so on.

[0075] As used herein, the terms “cross” or “crossed” refer to the fusion of gametes via pollination to produce progeny (e.g., cells, seeds or plants). The term encompasses both sexual crosses (the pollination of one plant by another) and selfing (self-pollination, e.g., when the pollen and ovule are from the same plant). The term “crossing” refers to the act of fusing gametes via pollination to produce progeny.

[0076] As used herein, the terms “introgression,” “introgressing” and “introgressed” refer to both the natural and artificial transmission of a desired allele or combination of desired alleles of a genetic locus or genetic loci from one genetic background to another. For example, a desired allele at a specified locus can be transmitted to at least one progeny via a sexual cross between two parents of the same species, where at least one of the parents has the desired allele in its genome. Alternatively, for example, transmission of an allele can occur by recombination between two donor genomes, e.g., in a fused protoplast, where at least one of the donor protoplasts has the desired allele in its genome. The desired allele may be a selected allele of a marker, a QTL, a transgene, or the like. Offspring comprising the desired allele can be backcrossed one or more times (e.g., 1, 2, 3, 4, or more times) to a line having a desired genetic background, selecting for the desired allele, with the result being that the desired allele becomes fixed in the desired genetic background. For example, a marker associated with increased yield under non-water stress conditions may be introgressed from a donor into a recurrent parent that does not comprise the marker and does not exhibit increased yield under non-water stress conditions. The resulting offspring could then be backcrossed one or more times and selected until the progeny possess the genetic marker(s) associated with increased yield under non-water stress conditions in the recurrent parent background.

[0077] A “genetic map” is a description of genetic linkage relationships among loci on one or more chromosomes within a given species, generally depicted in a diagrammatic or tabular form. For each genetic map, distances between loci are measured by the recombination frequencies between them. Recombination between loci can be detected using a variety of markers. A genetic map is a product of the mapping population, types of markers used, and the polymorphic potential of each marker between different populations. The order and genetic distances between loci can differ from one genetic map to another.

[0078] As used herein, the term “genotype” refers to the genetic constitution of an individual (or group of individuals) at one or more genetic loci, as contrasted with the observable and/or detectable and/or manifested trait (the phenotype). Genotype is defined by the allele(s) of one or more known loci that the individual has inherited from its parents. The term genotype can be used to refer to an individual's genetic constitution at a single locus, at multiple loci, or more generally, the term genotype can be used to refer to an individual's genetic make-up for all the genes in its genome. Genotypes can be indirectly characterized, e.g., using markers and/or directly characterized by nucleic acid sequencing.

[0079] As used herein, the term “germplasm” refers to genetic material of or from an individual (e.g., a plant), a group of individuals (e.g., a plant line, variety or family), or a clone derived from a line, variety, species, or culture. The germplasm can be part of an organism or cell or can be separate from the organism or cell. In general, germplasm provides genetic material with a specific genetic makeup that provides a foundation for some or all of the hereditary qualities of an organism or cell culture. As used herein, germplasm includes cells, seed or tissues from which new plants may be grown, as well as plant parts that can be cultured into a whole plant (e.g., leaves, stems, buds, roots, pollen, cells, etc.).

[0080] As used herein, the terms “cultivar” and “variety” refer to a group of similar plants that by structural or genetic features and/or performance can be distinguished from other varieties within the same species.

[0081] As used herein, the terms “exotic,” “exotic line” and “exotic germplasm” refer to any plant, line or germplasm that is not elite. In general, exotic plants/germplasms are not derived from any known elite plant or germplasm, but rather are selected to introduce one or more desired genetic elements into a breeding program (e.g., to introduce novel alleles into a breeding program).

[0082] As used herein, the term “hybrid” in the context of plant breeding refers to a plant that is the offspring of genetically dissimilar parents produced by crossing plants of different lines or breeds or species, including but not limited to the cross between two inbred lines.

[0083] As used herein, the term “inbred” refers to a substantially homozygous plant or variety. The term may refer to a plant or plant variety that is substantially homozygous throughout the entire genome or that is substantially homozygous with respect to a portion of the genome that is of particular interest.

[0084] A “haplotype” is the genotype of an individual at a plurality of genetic loci, i.e., a combination of alleles. Typically, the genetic loci that define a haplotype are physically and genetically linked, i.e., on the same chromosome segment. The term “haplotype” can refer to polymorphisms at a particular locus, such as a single marker locus, or polymorphisms at multiple loci along a chromosomal segment.

[0085] As used herein, the term “heterologous” refers to a nucleotide/polypeptide that originates from a foreign species, or, if from the same species, is substantially modified from its native form in composition and/or genomic locus by deliberate human intervention.

[0086] A plant in which the activity of at least one CKX polypeptide is modified as described herein may have improved yield traits as compared to a plant that does not comprise the modification (e.g., an increase or a decrease) in CKX activity. As used herein, “improved yield traits” refers to any plant trait associated with growth, for example, biomass, yield, nitrogen use efficiency (NUE), inflorescence size/weight, fruit yield, fruit quality, fruit size, seed size, seed number, foliar tissue weight, nodulation number, nodulation mass, nodulation activity, number of seed heads, number of tillers, number of branches, number of flowers, number of tubers, tuber mass, bulb mass, number of seeds, total seed mass, rate of leaf emergence, rate of tiller/branch emergence, rate of seedling emergence, length of roots, number of roots, size and/or weight of root mass, or any combination thereof. Thus, in some aspects, “improved yield traits” may include, but is not limited to, increased inflorescence production, increased fruit production (e.g., increased number, weight and/or size of fruit; e.g., increase number, weight, and/or size of ears for, e.g., maize), increased fruit quality, increased number, size and/or weight of roots, increased meristem size, increased seed size, increased biomass, increased leaf size, increased nitrogen use efficiency, increased height, increased internode number and/or increased internode length as compared to a control plant or part thereof (e.g., a plant that does not comprise a mutated endogenous CKX nucleic acid (e.g., a mutated CKX1 gene, a mutated CKX2 gene, a mutated CKX3 gene, a mutated CKX4 gene, a mutated CKX5 gene, and/or a mutated CKX6 gene)). Improved yield traits can also result from increased planting density of plants of the invention. Thus, in some aspects, a plant of the invention is capable of being planted at an increased density (as a consequence of altered plant architecture resulting from the endogenous mutation), which results in improved yield traits as compared to a control plant that is planted at the same density. In some aspects, improved yield traits can be expressed as quantity of grain produced per area of land (e.g., bushels per acre of land).

[0087] As used herein a “control plant” means a plant that does not contain an edited CKX gene or genes as described herein that imparts an enhanced/improved trait (e.g., yield trait) or altered phenotype. A control plant is used to identify and select a plant edited as described herein and that has an enhanced trait or altered phenotype. A suitable control plant can be a plant of the parental line used to generate a plant comprising a mutated CKX gene(s), for example, a wild type plant devoid of an edit in an endogenous CKX gene as described herein. A suitable control plant can also be a plant that contains recombinant nucleic acids that impart other traits, for example, a transgenic plant having enhanced herbicide tolerance. A suitable control plant can in some cases be a progeny of a heterozygous or hemizygous transgenic plant line that is devoid of a mutated CKX gene as described herein, known as a negative segregant, or a negative isogenic line.

[0088] An enhanced trait may be, for example, decreased days from planting to maturity, increased stalk size, increased number of leaves, increased plant height growth rate in vegetative stage, increased ear size, increased ear dry weight per plant, increased number of kernels per ear, increased weight per kernel, increased number of kernels per plant, decreased ear void, extended grain fill period, reduced plant height, increased number of root branches, increased total root length, increased yield, increased nitrogen use efficiency, and increased water use efficiency as compared to a control plant. An altered phenotype may be, for example, plant height, biomass, canopy area, anthocyanin content, chlorophyll content, water applied, water content, and water use efficiency.

[0089] As used herein a “trait” is a physiological, morphological, biochemical, or physical characteristic of a plant or particular plant material or cell. In some instances, this characteristic is visible to the human eye and can be measured mechanically, such as seed or plant size, weight, shape, form, length, height, growth rate and development stage, or can be measured by biochemical techniques, such as detecting the protein, starch, certain metabolites, or oil content of seed or leaves, or by observation of a metabolic or physiological process, for example, by measuring tolerance to water deprivation or particular salt or sugar concentrations, or by the measurement of the expression level of a gene or genes, for example, by employing Northern analysis, RT-PCR, microarray gene expression assays, or reporter gene expression systems, or by agricultural observations such as hyperosmotic stress tolerance or yield. Any technique can be used to measure the amount of, comparative level of, or difference in any selected chemical compound or macromolecule in the transgenic plants, however.

[0090] As used herein an “enhanced trait” means a characteristic of a plant resulting from mutations in a CKX gene(s) as described herein. Such traits include, but are not limited to, an enhanced agronomic trait characterized by enhanced plant morphology, physiology, growth and development, yield, nutritional enhancement, disease or pest resistance, or environmental or chemical tolerance. In some embodiments, an enhanced trait/altered phenotype may be, for example, decreased days from planting to maturity, increased stalk size, increased number of leaves, increased plant height growth rate in vegetative stage, increased ear size, increased ear dry weight per plant, increased number of kernels per ear, increased weight per kernel, increased number of kernels per plant, decreased ear void, extended grain fill period, reduced plant height, increased number of root branches, increased total root length, drought tolerance, increased water use efficiency, cold tolerance, increased nitrogen use efficiency, and increased yield. In some embodiments, a trait is increased yield under nonstress conditions or increased yield under environmental stress conditions. Stress conditions can include both biotic and abiotic stress, for example, drought, shade, fungal disease, viral disease, bacterial disease, insect infestation, nematode infestation, cold temperature exposure, heat exposure, osmotic stress, reduced nitrogen nutrient availability, reduced phosphorus nutrient availability and high plant density. “Yield” can be affected by many properties including without limitation, plant height, plant biomass, pod number, pod position on the plant, number of internodes, incidence of pod shatter, grain size, ear size, ear tip filling, kernel abortion, efficiency of nodulation and nitrogen fixation, efficiency of nutrient assimilation, resistance to biotic and abiotic stress, carbon assimilation, plant architecture, resistance to lodging, percent seed germination, seedling vigor, and juvenile traits. Yield can also be affected by efficiency of germination (including germination in stressed conditions), growth rate (including growth rate in stressed conditions), flowering time and duration, ear number, ear size, ear weight, seed number per ear or pod, seed size, composition of seed (starch, oil, protein) and characteristics of seed fill.

[0091] Also used herein, the term “trait modification” encompasses altering the naturally occurring trait by producing a detectable difference in a characteristic in a plant comprising a mutation in an endogenous CKX gene as described herein relative to a plant not comprising the mutation, such as a wild-type plant, or a negative segregant. In some cases, the trait modification can be evaluated quantitatively. For example, the trait modification can entail an increase or decrease in an observed trait characteristics or phenotype as compared to a control plant. It is known that there can be natural variations in a modified trait. Therefore, the trait modification observed entails a change of the normal distribution and magnitude of the trait characteristics or phenotype in the plants as compared to a control plant.

[0092] The present disclosure relates to a plant with improved economically important characteristics, more specifically increased yield. More specifically the present disclosure relates to a plant comprising a mutation(s) in a CKX gene(s) as described herein, wherein the plant has increased yield as compared to a control plant devoid of said mutation(s). In some embodiments, plants produced as described herein exhibit increased yield or improved yield trait components as compared to a control plant. In some embodiments, a plant of the present disclosure exhibits an improved trait that is related to yield, including but not limited to increased nitrogen use efficiency, increased nitrogen stress tolerance, increased water use efficiency and increased drought tolerance, as defined and discussed infra.

[0093] Yield can be defined as the measurable produce of economic value from a crop. Yield can be defined in the scope of quantity and/or quality. Yield can be directly dependent on several factors, for example, the number and size of organs, plant architecture (such as the number of branches, plant biomass, etc.), flowering time and duration, grain fill period. Root architecture and development, photosynthetic efficiency, nutrient uptake, stress tolerance, early vigor, delayed senescence and functional stay green phenotypes may be factors in determining yield. Optimizing the above-mentioned factors can therefore contribute to increasing crop yield.

[0094] Reference herein to an increase/improvement in yield-related traits can also be taken to mean an increase in biomass (weight) of one or more parts of a plant, which can include above ground and/or below ground (harvestable) plant parts. In particular, such harvestable parts are seeds, and performance of the methods of the disclosure results in plants with increased yield and in particular increased seed yield relative to the seed yield of suitable control plants. The term “yield” of a plant can relate to vegetative biomass (root and/or shoot biomass), to reproductive organs, and/or to propagules (such as seeds) of that plant.

[0095] Increased yield of a plant of the present disclosure can be measured in a number of ways, including test weight, seed number per plant, seed weight, seed number per unit area (for example, seeds, or weight of seeds, per acre), bushels per acre, tons per acre, or kilo per hectare. Increased yield can result from improved utilization of key biochemical compounds, such as nitrogen, phosphorous and carbohydrate, or from improved responses to environmental stresses, such as cold, heat, drought, salt, shade, high plant density, and attack by pests or pathogens.

[0096] “Increased yield” can manifest as one or more of the following: (i) increased plant biomass (weight) of one or more parts of a plant, particularly aboveground (harvestable) parts, of a plant, increased root biomass (increased number of roots, increased root thickness, increased root length) or increased biomass of any other harvestable part; or (ii) increased early vigor, defined herein as an improved seedling aboveground area approximately three weeks post-germination.

[0097] “Early vigor” refers to active healthy plant growth especially during early stages of plant growth, and can result from increased plant fitness due to, for example, the plants being better adapted to their environment (for example, optimizing the use of energy resources, uptake of nutrients and partitioning carbon allocation between shoot and root). Early vigor, for example, can be a combination of the ability of seeds to germinate and emerge after planting and the ability of the young plants to grow and develop after emergence. Plants having early vigor also show increased seedling survival and better establishment of the crop, which often results in highly uniform fields with the majority of the plants reaching the various stages of development at substantially the same time, which often results in increased yield. Therefore, early vigor can be determined by measuring various factors, such as kernel weight, percentage germination, percentage emergence, seedling growth, seedling height, root length, root and shoot biomass, canopy size and color and others.

[0098] Further, increased yield can also manifest as increased total seed yield, which may result from one or more of an increase in seed biomass (seed weight) due to an increase in the seed weight on a per plant and/or on an individual seed basis an increased number of, for example, flowers/panicles per plant; an increased number of pods; an increased number of nodes; an increased number of flowers (“florets”) per panicle/plant; increased seed fill rate; an increased number of filled seeds; increased seed size (length, width, area, perimeter), which can also influence the composition of seeds; and/or increased seed volume, which can also influence the composition of seeds. In one embodiment, increased yield can be increased seed yield, for example, increased seed weight; increased number of filled seeds; and increased harvest index.

[0099] Increased yield can also result in modified architecture, or can occur because of modified plant architecture.

[0100] Increased yield can also manifest as increased harvest index, which is expressed as a ratio of the yield of harvestable parts, such as seeds, over the total biomass

[0101] The disclosure also extends to harvestable parts of a plant such as, but not limited to, seeds, leaves, fruits, flowers, bolls, pods, siliques, nuts, stems, rhizomes, tubers and bulbs. The disclosure furthermore relates to products derived from a harvestable part of such a plant, such as dry pellets, powders, oil, fat and fatty acids, starch or proteins.

[0102] The present disclosure provides a method for increasing “yield” of a plant or “broad acre yield” of a plant or plant part defined as the harvestable plant parts per unit area, for example seeds, or weight of seeds, per acre, pounds per acre, bushels per acre, tones per acre, tons per acre, kilo per hectare.

[0103] As used herein “nitrogen use efficiency” refers to the processes which lead to an increase in the plant's yield, biomass, vigor, and growth rate per nitrogen unit applied. The processes can include the uptake, assimilation, accumulation, signaling, sensing, retranslocation (within the plant) and use of nitrogen by the plant.

[0104] As used herein “increased nitrogen use efficiency” refers to the ability of plants to grow, develop, or yield faster or better than normal when subjected to the same amount of available/applied nitrogen as under normal or standard conditions; ability of plants to grow, develop, or yield normally, or grow, develop, or yield faster or better when subjected to less than optimal amounts of available/applied nitrogen, or under nitrogen limiting conditions.

[0105] As used herein “nitrogen limiting conditions” refers to growth conditions or environments that provide less than optimal amounts of nitrogen needed for adequate or successful plant metabolism, growth, reproductive success and/or viability.

[0106] As used herein the “increased nitrogen stress tolerance” refers to the ability of plants to grow, develop, or yield normally, or grow, develop, or yield faster or better when subjected to less than optimal amounts of available/applied nitrogen, or under nitrogen limiting conditions.

[0107] Increased plant nitrogen use efficiency can be translated in the field into either harvesting similar quantities of yield, while supplying less nitrogen, or increased yield gained by supplying optimal/sufficient amounts of nitrogen. The increased nitrogen use efficiency can improve plant nitrogen stress tolerance and can also improve crop quality and biochemical constituents of the seed such as protein yield and oil yield. The terms “increased nitrogen use efficiency”, “enhanced nitrogen use efficiency”, and “nitrogen stress tolerance” are used inter-changeably in the present disclosure to refer to plants with improved productivity under nitrogen limiting conditions.

[0108] As used herein “water use efficiency” refers to the amount of carbon dioxide assimilated by leaves per unit of water vapor transpired. It constitutes one of the most important traits controlling plant productivity in dry environments. “Drought tolerance” refers to the degree to which a plant is adapted to arid or drought conditions. The physiological responses of plants to a deficit of water include leaf wilting, a reduction in leaf area, leaf abscission, and the stimulation of root growth by directing nutrients to the underground parts of the plants. Typically, plants are more susceptible to drought during flowering and seed development (the reproductive stages), as plant's resources are deviated to support root growth. In addition, abscisic acid (ABA), a plant stress hormone, induces the closure of leaf stomata (microscopic pores involved in gas exchange), thereby reducing water loss through transpiration, and decreasing the rate of photosynthesis. These responses improve the water-use efficiency of the plant on the short term. The terms “increased water use efficiency”, “enhanced water use efficiency”, and “increased drought tolerance” are used inter-changeably in the present disclosure to refer to plants with improved productivity under water-limiting conditions.

[0109] As used herein “increased water use efficiency” refers to the ability of plants to grow, develop, or yield faster or better than normal when subjected to the same amount of available/applied water as under normal or standard conditions; ability of plants to grow, develop, or yield normally, or grow, develop, or yield faster or better when subjected to reduced amounts of available/applied water (water input) or under conditions of water stress or water deficit stress.

[0110] As used herein “increased drought tolerance” refers to the ability of plants to grow, develop, or yield normally, or grow, develop, or yield faster or better than normal when subjected to reduced amounts of available/applied water and/or under conditions of acute or chronic drought; ability of plants to grow, develop, or yield normally when subjected to reduced amounts of available/applied water (water input) or under conditions of water deficit stress or under conditions of acute or chronic drought.

[0111] As used herein, “drought stress” refers to a period of dryness (acute or chronic/prolonged) that results in water deficit and subjects plants to stress and/or damage to plant tissues and/or negatively affects grain/crop yield; a period of dryness (acute or chronic/prolonged) that results in water deficit and/or higher temperatures and subjects plants to stress and/or damage to plant tissues and/or negatively affects grain/crop yield.

[0112] As used herein, “water deficit” refers to the conditions or environments that provide less than optimal amounts of water needed for adequate/successful growth and development of plants.

[0113] As used herein, “water stress” refers to the conditions or environments that provide improper (either less/insufficient or more/excessive) amounts of water than that needed for adequate/successful growth and development of plants/crops thereby subjecting the plants to stress and/or damage to plant tissues and/or negatively affecting grain/crop yield.

[0114] As used herein “water deficit stress” refers to the conditions or environments that provide less/insufficient amounts of water than that needed for adequate/successful growth and development of plants/crops thereby subjecting the plants to stress and/or damage to plant tissues and/or negatively affecting grain yield.

[0115] As used herein, the terms “nucleic acid,” “nucleic acid molecule,” “nucleotide sequence” and “polynucleotide” refer to RNA or DNA that is linear or branched, single or double stranded, or a hybrid thereof. The term also encompasses RNA/DNA hybrids. When dsRNA is produced synthetically, less common bases, such as inosine, 5-methylcytosine, 6-methyladenine, hypoxanthine and others can also be used for antisense, dsRNA, and ribozyme pairing. For example, polynucleotides that contain C-5 propyne analogues of uridine and cytidine have been shown to bind RNA with high affinity and to be potent antisense inhibitors of gene expression. Other modifications, such as modification to the phosphodiester backbone, or the 2′-hydroxy in the ribose sugar group of the RNA can also be made.

[0116] As used herein, the term “nucleotide sequence” refers to a heteropolymer of nucleotides or the sequence of these nucleotides from the 5′ to 3′ end of a nucleic acid molecule and includes DNA or RNA molecules, including cDNA, a DNA fragment or portion, genomic DNA, synthetic (e.g., chemically synthesized) DNA, plasmid DNA, mRNA, and anti-sense RNA, any of which can be single stranded or double stranded. The terms “nucleotide sequence” “nucleic acid,” “nucleic acid molecule,” “nucleic acid construct,” “oligonucleotide” and “polynucleotide” are also used interchangeably herein to refer to a heteropolymer of nucleotides. Nucleic acid molecules and/or nucleotide sequences provided herein are presented herein in the 5′ to 3′ direction, from left to right and are represented using the standard code for representing the nucleotide characters as set forth in the U.S. sequence rules, 37 CFR §§ 1.821-1.825 and the World Intellectual Property Organization (WIPO) Standard ST.25. A “5′ region” as used herein can mean the region of a polynucleotide that is nearest the 5′ end of the polynucleotide. Thus, for example, an element in the 5′ region of a polynucleotide can be located anywhere from the first nucleotide located at the 5′ end of the polynucleotide to the nucleotide located halfway through the polynucleotide. A “3′ region” as used herein can mean the region of a polynucleotide that is nearest the 3′ end of the polynucleotide. Thus, for example, an element in the 3′ region of a polynucleotide can be located anywhere from the first nucleotide located at the 3′ end of the polynucleotide to the nucleotide located halfway through the polynucleotide.

[0117] As used herein with respect to nucleic acids, the term “fragment” or “portion” refers to a nucleic acid that is reduced in length relative (e.g., reduced by 1, 2, 3, 4, 5, 6, 7, 8, 9, 10, 11, 12, 13, 14, 15, 16, 17, 18, 19, 20, 30, 40, 50, 60, 70, 80, 90, 100, 110, 120, 130, 140, 150, 160, 170, 180, 190, 200, 210, 220, 230, 240, 250, 260, 270, 280, 290, 300, 310, 320, 330, 340, 350, 400, 450, 500, 550, 600, 650, 700, 750, 800, 850, 900, 950 or 1000 or more nucleotides or any range or value therein) to a reference nucleic acid and that comprises, consists essentially of and/or consists of a nucleotide sequence of contiguous nucleotides identical or almost identical (e.g., 70%, 71%, 72%, 73%, 74%, 75%, 76%, 77%, 78%, 79%, 80%, 81%, 82%, 83%, 84%, 85%, 86%, 87%, 88%, 89%, 90%, 91%, 92%, 93%, 94%, 95%, 96%, 97%, 98%, 99% identical) to a corresponding portion of the reference nucleic acid. As an example, a nucleic acid encoding a CKX polypeptide may be reduced by 1, 2, 3, 4, 5, 6, 7, 8, 9, 10, 11, 12, 13, 14, 15, 16, 17, 18, 19, 20, 25 30, 35, 40, 45, 50, 55, 60, 65, 70, 75, 80, 85, 90, 100, 105, 110, 115, 120, 125, 130, 135, 140, 145, 150, 155, 160, 165, 170, 175, or 180, or more nucleotides or any range or value therein, which reduction can result in improved yield traits in a plant. Such a nucleic acid fragment may be, where appropriate, included in a larger polynucleotide of which it is a constituent. As a further example, a repeat sequence of guide nucleic acid of this invention may comprise a portion of a wild type CRISPR-Cas repeat sequence (e.g., a wild Type CRISR-Cas repeat; e.g., a repeat from the CRISPR Cas system of, for example, a Cas9, Cas12a (Cpf1), Cas12b, Cas12c (C2c3), Cas12d (CasY), Cas12e (CasX), Cas12g, Cas12h, Cas12i, C2c4, C2c5, C2c8, C2c9, C2c10, Cas14a, Cas14b, and/or a Cas14c, and the like).

[0118] In some embodiments, a nucleic acid fragment or portion may comprise, consist essentially of or consist of about 1, 2, 3, 4, 5, 6, 7, 8, 9, 10, 15, 20, 25, 30, 35, 40, 45, 50, 60, 70, 80, 90, 100, 150, 200, 250, 300, 350, 400, 450, 500, 550, 600, 660, 700, 750, 800, 850, 900, 950, 1000, 1050, 1100, 1150, 1200, 1250, 1300, 1350, 1400, 1450, 1500, 1550, 1600, 1650, 1700, 1750, 1800, 1850, 1900, 1950, 2000, 2050, 2100, 2150, 2200, 2300, 2400, 2500, 2600, 2700, 2800, 2900, 3000, 3500, 4000, 4500, 5000, 5500, 6000, 6500, 7000, 7500, 8000, 8100, 8185 or more or more consecutive nucleotides of a CKX nucleic acid, optionally about 2800 consecutive base pairs to about 8190 consecutive base pairs from the 3′ end or about 650 consecutive base pairs to about 1620 consecutive base pairs from 3′ end; optionally up to the full length of the CKX nucleic acid, which reduction can result in improved yield traits in a plant.

[0119] In some embodiments, a nucleic acid fragment or portion may be the result of a truncation of a CKX1 nucleic acid in which 5516 consecutive nucleotides may be deleted from genomic sequence, e.g., the entire 3′ end from nucleotide 1884 to 7399, and/or 1605 consecutive nucleotides from the coding sequence (cds), e.g., the entire 3′ end from nucleotide 28-1632. Thus, in some embodiments, a deletion results in a truncation of a CKX1 genomic sequence starting at about nucleotide 1880, 1881, 1882, 1883, 1884, 1885, 1886, 1887, 1888, 1889, 1890, 1895, 1900, 1905, 1910, 1915, 1920, 1925, 1930, 1935, 1940, 1945, 1950, 1960, 1970, 1980, 1990, 2000, 2010, 2020, 2030, 2040, 2041, 2045, 2050, or 2060 up to full length of the genomic sequence (e.g., up to nucleotide 7399) with reference to nucleotide position numbering of SEQ ID NO:72. In some embodiments, a deletion results in a truncation of a CKX1 coding sequence starting at about nucleotide 25, 26, 27, 28, 29, 30, 31, 32, 33, 34, 35, 36, 37, 38, 39, 40, 45, 50, 55, 60, 65, 70, 75, 80, 85, 90, 95, 100, 105, 110, 115, 120, 125, 130, 135, 140, 145, 150, 155, 160, 165, 170, 175, 180, 185, 190, 195, 200, or 205 up to full length of the coding sequence (e.g., up to nucleotide 1632) with reference to nucleotide position numbering of SEQ ID NO:73.

[0120] In some embodiments, a nucleic acid fragment or portion may be the result of a truncation of a CKX2 nucleic acid in which 5115 consecutive nucleotides may be deleted from genomic sequence, e.g., the entire 3′ end from nucleotide 803 to 5917, and/or 1610 consecutive nucleotides from the coding sequence (cds), e.g., the entire 3′ end from nucleotide 38 to 1647. Thus, in some embodiments, a deletion results in a truncation of a CKX2 genomic sequence starting at about nucleotide 800, 801, 802, 803, 804, 805, 806, 807, 808, 809, 810, 815, 820, 830, 840, 850, 860, 870, 880, 890, 900, 905, 910, 915, 920, 925, 930, 935, 940, 945, 950, or 955 up to full length of the genomic sequence (e.g., up to nucleotide 5917) with reference to nucleotide position numbering of SEQ ID NO:75. In some embodiments, a deletion results in a truncation of a CKX2 coding sequence starting at about nucleotide 35, 36, 37, 38, 39, 40, 45, 50, 55, 60, 65, 70, 75, 80, 85, 90, 95, 100, 105, 110, 115, 120, 125, 130, 135, 140, 145, 150, 155, 160, 165, 170, 175, 180, 185, or 190, up to full length of the coding sequence (e.g., up to nucleotide 1647) with reference to nucleotide position numbering of SEQ ID NO:76.

[0121] In some embodiments, a nucleic acid fragment or portion may be the result of a truncation of a CKX3 nucleic acid in which 5076 consecutive nucleotides may be deleted from genomic sequence, e.g., the entire 3′ end from nucleotide 692 to 5768, and/or 1574 consecutive nucleotides from the coding sequence (cds), e.g., the entire 3′ end from nucleotide 35 to 1608. Thus, in some embodiments, a deletion results in a truncation of a CKX3 genomic sequence starting at about nucleotide 690, 691, 692, 693, 694, 695, 670, 680, 690, 700, 710, 715, 720, 730, 740, 750, 760, 770, 780, 790, 800, 805, 810, 815, 820, 825, or 862 up to full length of the genomic sequence (e.g., up to nucleotide 5768) with reference to nucleotide position numbering of SEQ ID NO:78. In some embodiments, a deletion results in a truncation of a CKX3 coding sequence starting at about nucleotide 35, 36, 37, 38, 39, 40, 45, 50, 55, 60, 65, 70, 75, 80, 85, 90, 95, 100, 105, 110, 115, 120, 125, 130, 135, 140, 145, 150, 155, 160, 165, 166, 167, 168, or 169, up to full length of the coding sequence (e.g., up to nucleotide 1608) with reference to nucleotide position numbering of SEQ ID NO:79.

[0122] In some embodiments, a nucleic acid fragment or portion may be the result of a truncation of a CKX4 nucleic acid in which 8186 consecutive nucleotides may be deleted from genomic sequence, e.g., the entire 3′ end from nucleotide 1540-9725, and/or 1574 consecutive nucleotides from the coding sequence (cds), e.g., the entire 3′ end from nucleotide 2 to 1575. Thus, in some embodiments, a deletion results in a truncation of a CKX4 genomic sequence starting at about nucleotide 1540, 1541, 1542, 1543, 1544, 1545, 1546, 1547, 1548, 1549, 1550, 1555, 1560, 1570, 1580, 1590, 1600, 1610, 1620, 1630, 1640, 1645, 1650, 1660, 1670, 1680, 1685, 1686, 1687, 1688, 1689, 1690, 1700, 1800, 2000, 2500, 3000 up to full length of the genomic sequence (e.g., up to nucleotide 9725) with reference to nucleotide position numbering of SEQ ID NO:81. In some embodiments, a deletion results in a truncation of a CKX4 coding sequence starting at about nucleotide 2, 3, 4, 5, 6, 7, 8, 9, 10, 15, 20, 25, 30, 35, 40, 45, 50, 60, 70, 80, 90, 100, 105, 110, 115, 120, 125, 130, 135, 140, 145, 150, 151, 151, 152, 153, 154, or 155, up to full length of the coding sequence (e.g., up to nucleotide 1575) with reference to nucleotide position numbering of SEQ ID NO:82.

[0123] In some embodiments, a nucleic acid fragment or portion may be the result of a truncation of a CKX5 (error) nucleic acid in which 2972 consecutive nucleotides may be deleted from genomic sequence, e.g., the entire 3′ end from nucleotide 690-3661), and/or 678 consecutive nucleotides from the coding sequence (cds), e.g., the entire 3′ end from nucleotide 43 to 720. Thus, in some embodiments, a deletion results in a truncation of a CKX5 genomic sequence starting at about nucleotide 690, 691, 692, 693, 695, 696, 697, 698, 699, 700, 705, 710, 715, 720, 725, 730, 735, 740, 745, 750, 755, 760, 765, 770, 775, 780, 785, or 790 up to full length of the genomic sequence (e.g., up to nucleotide 3661) with reference to nucleotide position numbering of SEQ ID NO:84. In some embodiments, a deletion results in a truncation of a CKX5 coding sequence starting at about nucleotide 40, 41, 42, 43, 44, 45, 46, 47, 48, 49, 50, 55, 60, 65, 70, 75, 80, 85, 90, 95, 100, 105, 110, 25, 30, 35, 40, 45, 50, 60, 70, 80, 90, 100, 105, 110, 115, 120, 125, 130, 135, 140, 141, 142, 143, 144, or 145 up to full length of the coding sequence (e.g., up to nucleotide 720) with reference to nucleotide position numbering of SEQ ID NO:91.

[0124] In some embodiments, a nucleic acid fragment or portion may be the result of a truncation of a CKX5 nucleic acid in which 3338 consecutive nucleotides may be deleted from genomic sequence, e.g., the entire 3′ end from nucleotide 658-3995, and/or 1563 consecutive nucleotides from the coding sequence (cds), e.g., the entire 3′ end from nucleotide 43 to 1605. Thus, in some embodiments, a deletion results in a truncation of a CKX5 genomic sequence starting at about nucleotide 655, 656, 657, 658, 659, 660, 665, 670, 675, 680, 685, 690, 691, 692, 693, 695, 696, 697, 698, 699, 700, 705, 710, 715, 720, 725, 730, 735, 740, 745, 750, 755, 756, 757, or 758 up to full length of the genomic sequence (e.g., up to nucleotide 3995) with reference to nucleotide position numbering of SEQ ID NO:84. In some embodiments, a deletion results in a truncation of a CKX5 coding sequence starting at about nucleotide 40, 41, 42, 43, 44, 45, 46, 47, 48, 49, 50, 55, 60, 65, 70, 75, 80, 85, 90, 95, 100, 105, 110, 25, 30, 35, 40, 45, 50, 60, 70, 80, 90, 100, 105, 110, 115, 120, 125, 130, 135, 140, 141, 142, or 143 up to full length of the coding sequence (e.g., up to nucleotide 1605) with reference to nucleotide position numbering of SEQ ID NO:91.

[0125] In some embodiments, a nucleic acid fragment or portion may be the result of a truncation of a CKX6 nucleic acid in which 6716 consecutive nucleotides may be deleted from genomic sequence, e.g., the entire 3′ end from nucleotide 31 to 1494, and/or 678 consecutive nucleotides from the coding sequence (cds), e.g., the entire 3′ end from nucleotide 31 to 1494. Thus, in some embodiments, a deletion results in a truncation of a CKX6 genomic sequence starting at about nucleotide 1560, 1561, 1562, 1563, 1565, 1566, 1567, 1568, 1569, 1570, 1575, 1580, 1585, 1590, 1595, 1600, 1610, 1620, 1630, 1640, 1645, 1650, 1655, 1660, 1665, 1670, 1675, 1680, 1685, 1690, 1695, 1700, 1705, 1706, 1707, 1708, or 1709 up to full length of the genomic sequence (e.g., up to nucleotide 8277) with reference to nucleotide position numbering of SEQ ID NO:87. In some embodiments, a deletion results in a truncation of a CKX6 coding sequence starting at about nucleotide 30, 31, 32, 33, 34, 35, 36, 37, 38, 39, 40, 45, 50, 55, 60, 65, 70, 75, 80, 85, 90, 95, 100, 105, 110, 25, 30, 35, 40, 45, 50, 60, 70, 80, 90, 100, 105, 110, 115, 120, 125, 130, 135, 140, 145, 150, 155, 160, 165, 170, 175, 176, 177, 178 up to full length of the coding sequence (e.g., up to nucleotide 1494) with reference to nucleotide position numbering of SEQ ID NO:88.

[0126] As used herein with respect to polypeptides, the term “fragment” or “portion” may refer to a polypeptide that is reduced in length relative to a reference polypeptide and that comprises, consists essentially of and/or consists of an amino acid sequence of contiguous amino acids identical or almost identical (e.g., 90%, 91%, 92%, 93%, 94%, 95%, 96%, 97%, 98%, 99% identical) to a corresponding portion of the reference polypeptide. Such a polypeptide fragment may be, where appropriate, included in a larger polypeptide of which it is a constituent. In some embodiments, the polypeptide fragment comprises, consists essentially of or consists of at least about 2, 3, 4, 5, 6, 7, 8, 9, 10, 11, 12, 13, 14, 15, 20, 25, 30, 35, 40, 45, 50, 55, 60, 65, 70, 75, 80, 85, 90, 95, 100, 125, 150, 175, 200, 225, 250, 300, 350, 400 or more consecutive amino acids of a reference polypeptide.

[0127] In some embodiments, a “portion” may be related to the number of amino acids that are deleted from a polypeptide. Thus, for example, a deleted “portion” of a CKX polypeptide may comprise at least one amino acid residue (e.g., at least 1, or at least 2, 3, 4, 5, 6, 7, 8, 9, 10, 20, 30, 40, 50, 100, 150, 200, 250, 300, 350, 400, 450, 500 or more consecutive amino acid residues) deleted from the amino acid sequence of any one of SEQ ID NOs:74, 77, 80, 83, 89, or 92 (or from a sequence having at least 80% sequence identity (e.g., at least 80, 81, 82, 83, 84, 85, 86, 87, 88, 89, 90, 91, 92, 93, 94, 95, 96, 97, 98, 99 or 100% identity) to an amino acid sequence of any one of SEQ ID NOs:74, 77, 80, 83, 89, or 92).

[0128] In some embodiments, a deletion of amino acid residues from a CKX polypeptide (a truncated CKX polypeptide or loss of the CKX polypeptide) as described herein may result in a dominant negative mutation, a semi-dominant mutation, a weak loss-of-function mutation, a hypomorphic mutation, or a null mutation, which when comprised in a plant can result in the plant exhibiting improved yield traits as compared to a plant not comprising the deletion.

[0129] A “region” of a polynucleotide or a polypeptide refers to a portion of consecutive nucleotides or consecutive amino acid residues of that polynucleotide or a polypeptide, respectively. For example, a region of a CKX polynucleotide sequence may include, but is not limited to, consecutive nucleotides 1884-2060 of SEQ ID NO:72, consecutive nucleotides 28-204 of SEQ ID NO:73, consecutive nucleotides 803-955 of SEQ ID NO:75, consecutive nucleotides 38-190 of SEQ ID NO:76, consecutive nucleotides 692-826 of SEQ ID NO:78, consecutive nucleotides 35-169 of SEQ ID NO:79, consecutive nucleotides 1540-1689 of SEQ ID NO:81 consecutive nucleotides 2-151 of SEQ ID NO:82, consecutive nucleotides 690-790 of SEQ ID NO:84, consecutive nucleotides 1562-1709 of SEQ ID NO:87 consecutive nucleotides 31-178 of SEQ ID NO:88, and/or consecutive nucleotides 43-143 of SEQ ID NO:91 (see e.g., SEQ ID NOs:78, 79, 80, or 81), and a region of a CKX polypeptide may include, but is not limited to, amino acid residues 588-601 of SEQ ID NO:74 or SEQ ID NO:77 (see, e.g., SEQ ID NO:93, 94, 95, 96, 97, 98, or 99).

[0130] In some embodiments, a “sequence-specific nucleic acid binding domain” or “sequence-specific DNA binding domain” may bind to a CKX gene (e.g., SEQ ID NO:72, SEQ ID NO:73, SEQ ID NO:75, SEQ ID NO:76, SEQ ID NO:78, SEQ ID NO:79, SEQ ID NO:81, SEQ ID NO:82, SEQ ID NO:84, SEQ ID NO:87, SEQ ID NO:88, or SEQ ID NO:91) and/or to one or more fragments, portions, or regions of a CKX nucleic acid (e.g., SEQ ID NOs:93-97).

[0131] As used herein with respect to nucleic acids, the term “functional fragment” refers to nucleic acid that encodes a functional fragment of a polypeptide.

[0132] The term “gene,” as used herein, refers to a nucleic acid molecule capable of being used to produce mRNA, antisense RNA, miRNA, anti-microRNA antisense oligodeoxyribonucleotide (AMO) and the like. Genes may or may not be capable of being used to produce a functional protein or gene product. Genes can include both coding and non-coding regions (e.g., introns, regulatory elements, promoters, enhancers, termination sequences and/or 5′ and 3′ untranslated regions). A gene may be “isolated” by which is meant a nucleic acid that is substantially or essentially free from components normally found in association with the nucleic acid in its natural state. Such components include other cellular material, culture medium from recombinant production, and/or various chemicals used in chemically synthesizing the nucleic acid.

[0133] The term “mutation” refers to point mutations (e.g., missense, or nonsense, or insertions or deletions of single base pairs that result in in-frame shifts), insertions, deletions, and/or truncations. When the mutation is a substitution of a residue within an amino acid sequence with another residue, or a deletion or insertion of one or more residues within a sequence, the mutations are typically described by identifying the original residue followed by the position of the residue within the sequence and by the identity of the newly substituted residue In some embodiments, a deletion or an insertion is an in-frame deletion or an in-frame insertion. In some embodiments, a deletion may result in a frameshift mutation that generates a premature stop codon, thereby truncating the protein. In some embodiments, a deletion may result in a frameshift mutation that generates a premature stop codon, thereby truncating the protein. In some embodiments, a frameshift mutation is an out-of-frame mutation. In some embodiments, a frameshift mutation may be an in-frame mutation. A truncation can include a truncation at the C-terminal end of a polypeptide or at the N-terminal end of a polypeptide. A truncation of a polypeptide can be the result of a deletion in the corresponding 5′ end or 3′ end of the gene encoding the polypeptide. In some embodiments, the truncation of a CKX polypeptide is a C-terminal truncation that results from a deletion that occurs/initiates in the 5′ end of a CKX gene (e.g., a mutation that results in a premature stop codon), wherein the truncation results in an N-terminal fragment of the CKX polypeptide, optionally no polypeptide. In some embodiments, a mutation in an endogenous CKX gene may result in an inactive CKX polypeptide. In some embodiments, a mutation in the promoter (e.g., promoter bashing) of an endogenous CKX gene may result in modified (increased/decreased) expression of the CKX gene, and therefore an increased amount of the CKX polypeptide. In some embodiments, a mutation in an endogenous CKX gene may result in reduced expression of the CKX gene, and therefore a reduced amount of the CKX polypeptide that is a null or inactive polypeptide. An endogenous CKX gene mutated as described herein may have the same level of expression as a WT CKX gene, but the mutated gene produces a null or inactive CKX polypeptide.

[0134] The terms “complementary” or “complementarity,” as used herein, refer to the natural binding of polynucleotides under permissive salt and temperature conditions by base-pairing. For example, the sequence “A-G-T” (5′ to 3′) binds to the complementary sequence “T-C-A” (3′ to 5′). Complementarity between two single-stranded molecules may be “partial,” in which only some of the nucleotides bind, or it may be complete when total complementarity exists between the single stranded molecules. The degree of complementarity between nucleic acid strands has significant effects on the efficiency and strength of hybridization between nucleic acid strands.

[0135] “Complement,” as used herein, can mean 100% complementarity with the comparator nucleotide sequence or it can mean less than 100% complementarity (e.g., about 70%, 71%, 72%, 73%, 74%, 75%, 76%, 77%, 78%, 79%, 80%, 81%, 82%, 83%, 84%, 85%, 86%, 87%, 88%, 89%, 90%, 91%, 92%, 93%, 94%, 95%, 96%, 97%, 98%, 99%, and the like, complementarity; e.g., substantial complementarity) to the comparator nucleotide sequence.

[0136] Different nucleic acids or proteins having homology are referred to herein as “homologues.” The term homologue includes homologous sequences from the same and from other species and orthologous sequences from the same and other species. “Homology” refers to the level of similarity between two or more nucleic acid and/or amino acid sequences in terms of percent of positional identity (i.e., sequence similarity or identity). Homology also refers to the concept of similar functional properties among different nucleic acids or proteins. Thus, the compositions and methods of the invention further comprise homologues to the nucleotide sequences and polypeptide sequences of this invention. “Orthologous,” as used herein, refers to homologous nucleotide sequences and/or amino acid sequences in different species that arose from a common ancestral gene during speciation. A homologue of a nucleotide sequence of this invention has a substantial sequence identity (e.g., at least about 70%, 71%, 72%, 73%, 74%, 75%, 76%, 77%, 78%, 79%, 80%, 81%, 82%, 83%, 84%, 85%, 86%, 87%, 88%, 89%, 90%, 91%, 92%, 93%, 94%, 95%, 96%, 97%, 98%, 99%, 99.5% or 100%) to said nucleotide sequence of the invention.

[0137] As used herein “sequence identity” refers to the extent to which two optimally aligned polynucleotide or polypeptide sequences are invariant throughout a window of alignment of components, e.g., nucleotides or amino acids. “Identity” can be readily calculated by known methods including, but not limited to, those described in: Computational Molecular Biology (Lesk, A. M., ed.) Oxford University Press, New York (1988); Biocomputing: Informatics and Genome Projects (Smith, D. W., ed.) Academic Press, New York (1993); Computer Analysis of Sequence Data, Part I (Griffin, A. M., and Griffin, H. G., eds.) Humana Press, New Jersey (1994); Sequence Analysis in Molecular Biology (von Heinje, G., ed.) Academic Press (1987); and Sequence Analysis Primer (Gribskov, M. and Devereux, J., eds.) Stockton Press, New York (1991).

[0138] As used herein, the term “percent sequence identity” or “percent identity” refers to the percentage of identical nucleotides in a linear polynucleotide sequence of a reference (“query”) polynucleotide molecule (or its complementary strand) as compared to a test (“subject”) polynucleotide molecule (or its complementary strand) when the two sequences are optimally aligned. In some embodiments, “percent sequence identity” can refer to the percentage of identical amino acids in an amino acid sequence as compared to a reference polypeptide.

[0139] As used herein, the phrase “substantially identical,” or “substantial identity” in the context of two nucleic acid molecules, nucleotide sequences or polypeptide sequences, refers to two or more sequences or subsequences that have at least about 70%, 71%, 72%, 73%, 74%, 75%, 76%, 77%, 78%, 79%, 80%, 81%, 82%, 83%, 84%, 85%, 86%, 87%, 88%, 89%, 90%, 91%, 92%, 93%, 94%, 95%, 96%, 97%, 98%, 99%, 99.5% or 100% nucleotide or amino acid residue identity, when compared and aligned for maximum correspondence, as measured using one of the following sequence comparison algorithms or by visual inspection. In some embodiments of the invention, the substantial identity exists over a region of consecutive nucleotides of a nucleotide sequence of the invention that is about 10 nucleotides to about 20 nucleotides, about 10 nucleotides to about 25 nucleotides, about 10 nucleotides to about 30 nucleotides, about 15 nucleotides to about 25 nucleotides, about 30 nucleotides to about 40 nucleotides, about 50 nucleotides to about 60 nucleotides, about 70 nucleotides to about 80 nucleotides, about 90 nucleotides to about 100 nucleotides, about 100 nucleotides to about 200 nucleotides, about 100 nucleotides to about 300 nucleotides, about 100 nucleotides to about 400 nucleotides, about 100 nucleotides to about 500 nucleotides, about 100 nucleotides to about 600 nucleotides, about 100 nucleotides to about 800 nucleotides, about 100 nucleotides to about 900 nucleotides, or more nucleotides in length, and any range therein, up to the full length of the sequence. In some embodiments, nucleotide sequences can be substantially identical over at least about 20 consecutive nucleotides (e.g., about 20, 21, 22, 23, 24, 25, 26, 27, 28, 29, 30, 31, 32, 33, 34, 35, 36, 37, 38, 39, 40, 50, 60, 70, 80, 90, 100, 200, 300, 400, 500, 600, 700, 800, 900, 1000, 1100, 1200, 1300, 1400, 1500, 1600, 1700, 1800, 1900, 2000, 2100, 2200, 2300, 2500, 3000, 3500, 4000 or more nucleotides). In some embodiments, two or more CKX genes may be substantially identical to one another over at least about 50, 100, 200, 300, 400, 500, 600, 700, 800, 900, 1000, 1100, 1200, 1300, 1400, or 1500 to about 2000, 2050, 2100, 2150, 2200, 2250, 2300, 2350, 2400, 2450, 2500, 2510, 2520, 2530, 2540, 2550, 2600, 2650, 2700, 2750, 2800, 2850, 2900, 2950, 3000, 3050, 3100, 3150, 3200, 3250, 3300, 3350, 3400, 3410, or 3420 or more consecutive nucleotides of SEQ ID NO:72, SEQ ID NO:73, SEQ ID NO:75, SEQ ID NO:76, SEQ ID NO:78, SEQ ID NO:79, SEQ ID NO:81, SEQ ID NO:82, SEQ ID NO:84, SEQ ID NO:87, SEQ ID NO:88, or SEQ ID NO:91, over at least about 100, 110, 120, 130, 140, or 150 to about 200, 210, 220, 230, 240, 250, 260, 270, 280, 290, 300, 400, 500, 600, 700, 750, 800, 810, 820, 830, 840, 850, 900, 1000, 1250, 1500, 1750, 2000, 2500, 3000, or 3500 or more consecutive nucleotides SEQ ID NO:72, SEQ ID NO:73, SEQ ID NO:75, SEQ ID NO:76, SEQ ID NO:78, SEQ ID NO:79, SEQ ID NO:81, SEQ ID NO:82, SEQ ID NO:84, SEQ ID NO:87, SEQ ID NO:88, or SEQ ID NO:91.

[0140] In some embodiments of the invention, the substantial identity exists over a region of consecutive amino acid residues of a polypeptide of the invention that is about 3 amino acid residues to about 10, 11, 12, 13, 14, 15, 16, 17, 18, 19, or 20 amino acid residues, about 5 amino acid residues to about 25, 30, 35, 40, 45, 50 or 60 amino acid residues, about 15 amino acid residues to about 30 amino acid residues, about 20 amino acid residues to about 40 amino acid residues, about 25 amino acid residues to about 40 amino acid residues, about 25 amino acid residues to about 50 amino acid residues, about 30 amino acid residues to about 50 amino acid residues, about 40 amino acid residues to about 50 amino acid residues, about 40 amino acid residues to about 70 amino acid residues, about 50 amino acid residues to about 70 amino acid residues, about 60 amino acid residues to about 80 amino acid residues, about 70 amino acid residues to about 80 amino acid residues, about 90 amino acid residues to about 100 amino acid residues, or more amino acid residues in length, and any range therein, up to the full length of the sequence. In some embodiments, polypeptide sequences can be substantially identical to one another over at least about 8, 9, 10, 11, 12, 13, 14, or more consecutive amino acid residues (e.g., about 8, 9, 10, 11, 12, 13, 14, 15, 16, 17, 18, 19, 20, 21, 22, 23, 24, 25, 26, 27, 28, 29, 30, 31, 32, 33, 34, 35, 36, 37, 38, 39, 40, 41, 42, 43, 44, 45, 46, 47, 48, 49, 50, 51, 52, 53, 54, 55, 56, 57, 58, 59, 60, 61, 62, 63, 64, 65, 66, 67, 68, 69, 70, 71, 72, 73, 74, 75, 76, 77, 78, 79, 80, 81, 82, 83, 84, 85, 86, 87, 88, 89, 90, 91, 92, 93, 94, 95, 96, 97, 98, 99, 100, 101, 102, 103, 104, 105, 106, 107, 108, 109, 110, 111, 112, 113, 114, 115, 116, 117, 118, 119, 120, 130, 140, 150, 175, 200, 225, 250, 275, 300, 325, 350, 400, 450, 500, or more amino acids in length or more consecutive amino acid residues). In some embodiments, two or more CKX polypeptides may be substantially identical to one another over at least about 10 to about 500 consecutive amino acid residues of any one of the amino acid sequences of SEQ ID NOs:74, 77, 80, 83, 89, or 92; e.g., over at least about 10, 11, 12, 13, 14, 15, 16, 17, 18, 19, 20, 25, 30, 35, 40, 45, 50, 60, 70, 71, 72, 73, 74, 75, 76, 77, 78, 79, 80, 85, 90, 95, 100, 105, 110, 120, 125, 130, 135, 140, 145, 150, 155, 160, 165, 170, 175, 200, 225, 250, 275, 300, 325, 350, 400, 450, or 500 consecutive amino acid residues of any one of the amino acid sequences of SEQ ID NOs:74, 77, 80, 83, 89, or 92. In some embodiments, a substantially identical nucleotide or protein sequence may perform substantially the same function as the nucleotide (or encoded protein sequence) to which it is substantially identical.

[0141] For sequence comparison, typically one sequence acts as a reference sequence to which test sequences are compared. When using a sequence comparison algorithm, test and reference sequences are entered into a computer, subsequence coordinates are designated if necessary, and sequence algorithm program parameters are designated. The sequence comparison algorithm then calculates the percent sequence identity for the test sequence(s) relative to the reference sequence, based on the designated program parameters.

[0142] Optimal alignment of sequences for aligning a comparison window are well known to those skilled in the art and may be conducted by tools such as the local homology algorithm of Smith and Waterman, the homology alignment algorithm of Needleman and Wunsch, the search for similarity method of Pearson and Lipman, and optionally by computerized implementations of these algorithms such as GAP, BESTFIT, FASTA, and TFASTA available as part of the GCG® Wisconsin Package® (Accelrys Inc., San Diego, Calif.). An “identity fraction” for aligned segments of a test sequence and a reference sequence is the number of identical components which are shared by the two aligned sequences divided by the total number of components in the reference sequence segment, e.g., the entire reference sequence or a smaller defined part of the reference sequence. Percent sequence identity is represented as the identity fraction multiplied by 100. The comparison of one or more polynucleotide sequences may be to a full-length polynucleotide sequence or a portion thereof, or to a longer polynucleotide sequence. For purposes of this invention “percent identity” may also be determined using BLASTX version 2.0 for translated nucleotide sequences and BLASTN version 2.0 for polynucleotide sequences.

[0143] Two nucleotide sequences may also be considered substantially complementary when the two sequences hybridize to each other under stringent conditions. In some embodiments, two nucleotide sequences considered to be substantially complementary hybridize to each other under highly stringent conditions.

[0144] “Stringent hybridization conditions” and “stringent hybridization wash conditions” in the context of nucleic acid hybridization experiments such as Southern and Northern hybridizations are sequence dependent and are different under different environmental parameters. An extensive guide to the hybridization of nucleic acids is found in Tijssen Laboratory Techniques in Biochemistry and Molecular Biology-Hybridization with Nucleic Acid Probes part I chapter 2 “Overview of principles of hybridization and the strategy of nucleic acid probe assays” Elsevier, New York (1993). Generally, highly stringent hybridization and wash conditions are selected to be about 5° C. lower than the thermal melting point (Tₘ) for the specific sequence at a defined ionic strength and pH.

[0145] The Tₘ is the temperature (under defined ionic strength and pH) at which 50% of the target sequence hybridizes to a perfectly matched probe. Very stringent conditions are selected to be equal to the Tₘ for a particular probe. An example of stringent hybridization conditions for hybridization of complementary nucleotide sequences which have more than 100 complementary residues on a filter in a Southern or northern blot is 50% formamide with 1 mg of heparin at 42° C., with the hybridization being carried out overnight. An example of highly stringent wash conditions is 0.1 5M NaCl at 72° C. for about 15 minutes. An example of stringent wash conditions is a 0.2×SSC wash at 65° C. for 15 minutes (see, Sambrook, infra, for a description of SSC buffer). Often, a high stringency wash is preceded by a low stringency wash to remove background probe signal. An example of a medium stringency wash for a duplex of, e.g., more than 100 nucleotides, is 1×SSC at 45° C. for 15 minutes. An example of a low stringency wash for a duplex of, e.g., more than 100 nucleotides, is 4-6×SSC at 40° C. for 15 minutes. For short probes (e.g., about 10 to 50 nucleotides), stringent conditions typically involve salt concentrations of less than about 1.0 M Na ion, typically about 0.01 to 1.0 M Na ion concentration (or other salts) at pH 7.0 to 8.3, and the temperature is typically at least about 30° C. Stringent conditions can also be achieved with the addition of destabilizing agents such as formamide. In general, a signal to noise ratio of 2× (or higher) than that observed for an unrelated probe in the particular hybridization assay indicates detection of a specific hybridization. Nucleotide sequences that do not hybridize to each other under stringent conditions are still substantially identical if the proteins that they encode are substantially identical. This can occur, for example, when a copy of a nucleotide sequence is created using the maximum codon degeneracy permitted by the genetic code.

[0146] A polynucleotide and/or recombinant nucleic acid construct of this invention (e.g., expression cassettes and/or vectors) may be codon optimized for expression. In some embodiments, the polynucleotides, nucleic acid constructs, expression cassettes, and/or vectors of the editing systems of the invention (e.g., comprising/encoding a sequence-specific nucleic acid binding domain (e.g., a sequence-specific DNA binding domain from a polynucleotide-guided endonuclease, a zinc finger nuclease, a transcription activator-like effector nuclease (TALEN), an Argonaute protein, and/or a CRISPR-Cas endonuclease (e.g., CRISPR-Cas effector protein) (e.g., a Type I CRISPR-Cas effector protein, a Type II CRISPR-Cas effector protein, a Type III CRISPR-Cas effector protein, a Type IV CRISPR-Cas effector protein, a Type V CRISPR-Cas effector protein or a Type VI CRISPR-Cas effector protein)), a nuclease (e.g., an endonuclease (e.g., Fok1), a polynucleotide-guided endonuclease, a CRISPR-Cas endonuclease (e.g., CRISPR-Cas effector protein), a zinc finger nuclease, and/or a transcription activator-like effector nuclease (TALEN)), deaminase proteins/domains (e.g., adenine deaminase, cytosine deaminase), a polynucleotide encoding a reverse transcriptase protein or domain, a polynucleotide encoding a 5′-3′ exonuclease polypeptide, and/or affinity polypeptides, peptide tags, etc.) may be codon optimized for expression in a plant. In some embodiments, the codon optimized nucleic acids, polynucleotides, expression cassettes, and/or vectors of the invention have about 70% to about 99.9% (e.g., 70%, 71%, 72%, 73%, 74%, 75%, 76%, 77%, 78%, 79%, 80%, 81%, 82%, 83%, 84%, 85%, 86%, 87%, 88%, 89%, 90%, 91%, 92%, 93%, 94%, 95%, 96%, 97%, 98%, 99%, 99.5%. 99.9% or 100%) identity or more to the reference nucleic acids, polynucleotides, expression cassettes, and/or vectors that have not been codon optimized.

[0147] A polynucleotide or nucleic acid construct of the invention may be operatively associated with a variety of promoters and/or other regulatory elements for expression in a plant and/or a cell of a plant. Thus, in some embodiments, a polynucleotide or nucleic acid construct of this invention may further comprise one or more promoters, introns, enhancers, and/or terminators operably linked to one or more nucleotide sequences. In some embodiments, a promoter may be operably associated with an intron (e.g., Ubi1 promoter and intron). In some embodiments, a promoter associated with an intron maybe referred to as a “promoter region” (e.g., Ubi1 promoter and intron) (see, e.g., SEQ ID NO:21 and SEQ ID NO:22).

[0148] By “operably linked” or “operably associated” as used herein in reference to polynucleotides, it is meant that the indicated elements are functionally related to each other and are also generally physically related. Thus, the term “operably linked” or “operably associated” as used herein, refers to nucleotide sequences on a single nucleic acid molecule that are functionally associated. Thus, a first nucleotide sequence that is operably linked to a second nucleotide sequence means a situation when the first nucleotide sequence is placed in a functional relationship with the second nucleotide sequence. For instance, a promoter is operably associated with a nucleotide sequence if the promoter effects the transcription or expression of said nucleotide sequence. Those skilled in the art will appreciate that the control sequences (e.g., promoter) need not be contiguous with the nucleotide sequence to which it is operably associated, as long as the control sequences function to direct the expression thereof. Thus, for example, intervening untranslated, yet transcribed, nucleic acid sequences can be present between a promoter and the nucleotide sequence, and the promoter can still be considered “operably linked” to the nucleotide sequence.

[0149] As used herein, the term “linked,” in reference to polypeptides, refers to the attachment of one polypeptide to another. A polypeptide may be linked to another polypeptide (at the N-terminus or the C-terminus) directly (e.g., via a peptide bond) or through a linker.

[0150] The term “linker” is art-recognized and refers to a chemical group, or a molecule linking two molecules or moieties, e.g., two domains of a fusion protein, such as, for example, a nucleic acid/DNA binding polypeptide or domain and peptide tag and/or a reverse transcriptase and an affinity polypeptide that binds to the peptide tag; or a DNA endonuclease polypeptide or domain and peptide tag and/or a reverse transcriptase and an affinity polypeptide that binds to the peptide tag. A linker may be comprised of a single linking molecule or may comprise more than one linking molecule. In some embodiments, the linker can be an organic molecule, group, polymer, or chemical moiety such as a bivalent organic moiety. In some embodiments, the linker may be an amino acid or it may be a peptide. In some embodiments, the linker is a peptide.

[0151] In some embodiments, a peptide linker useful with this invention may be about 2 to about 100 or more amino acids in length, for example, about 2, 3, 4, 5, 6, 7, 8, 9, 10, 11, 12, 13, 14, 15, 16, 17, 18, 19, 20, 21, 22, 23, 24, 25, 26, 27, 28, 29, 30, 31, 32, 33, 34, 35, 36, 37, 38, 39, 40, 41, 42, 43, 44, 45, 46, 47, 48, 49, 50, 51, 52, 53, 54, 55, 56, 57, 58, 59, 60, 61, 62, 63, 64, 65, 66, 67, 68, 69, 70, 71, 72, 73, 74, 75, 76, 77, 78, 79, 80, 81, 82, 83, 84, 85, 86, 87, 88, 89, 90, 91, 92, 93, 94, 95, 96, 97, 98, 99, 100 or more amino acids in length (e.g., about 2 to about 40, about 2 to about 50, about 2 to about 60, about 4 to about 40, about 4 to about 50, about 4 to about 60, about 5 to about 40, about 5 to about 50, about 5 to about 60, about 9 to about 40, about 9 to about 50, about 9 to about 60, about 10 to about 40, about 10 to about 50, about 10 to about 60, or about 2, 3, 4, 5, 6, 7, 8, 9, 10, 11, 12, 13, 14, 15, 16, 17, 18, 19, 20, 21, 22, 23, 24, 25 amino acids to about 26, 27, 28, 29, 30, 31, 32, 33, 34, 35, 36, 37, 38, 39, 40, 41, 42, 43, 44, 45, 46, 47, 48, 49, 50, 51, 52, 53, 54, 55, 56, 57, 58, 59, 60, 61, 62, 63, 64, 65, 66, 67, 68, 69, 70, 71, 72, 73, 74, 75, 76, 77, 78, 79, 80, 81, 82, 83, 84, 85, 86, 87, 88, 89, 90, 91, 92, 93, 94, 95, 96, 97, 98, 99, 100 or more amino acids in length (e.g., about 105, 110, 115, 120, 130, 140 150 or more amino acids in length). In some embodiments, a peptide linker may be a GS linker.

[0152] As used herein, the term “linked,” or “fused” in reference to polynucleotides, refers to the attachment of one polynucleotide to another. In some embodiments, two or more polynucleotide molecules may be linked by a linker that can be an organic molecule, group, polymer, or chemical moiety such as a bivalent organic moiety. A polynucleotide may be linked or fused to another polynucleotide (at the 5′ end or the 3′ end) via a covalent or non-covenant linkage or binding, including e.g., Watson-Crick base-pairing, or through one or more linking nucleotides. In some embodiments, a polynucleotide motif of a certain structure may be inserted within another polynucleotide sequence (e.g., extension of the hairpin structure in the guide RNA). In some embodiments, the linking nucleotides may be naturally occurring nucleotides. In some embodiments, the linking nucleotides may be non-naturally occurring nucleotides.

[0153] A “promoter” is a nucleotide sequence that controls or regulates the transcription of a nucleotide sequence (e.g., a coding sequence) that is operably associated with the promoter. The coding sequence controlled or regulated by a promoter may encode a polypeptide and/or a functional RNA. Typically, a “promoter” refers to a nucleotide sequence that contains a binding site for RNA polymerase II and directs the initiation of transcription. In general, promoters are found 5′, or upstream, relative to the start of the coding region of the corresponding coding sequence. A promoter may comprise other elements that act as regulators of gene expression;

[0154] e.g., a promoter region. These include a TATA box consensus sequence, and often a CAAT box consensus sequence (Breathnach and Chambon, (1981) Annu. Rev. Biochem. 50:349). In plants, the CAAT box may be substituted by the AGGA box (Messing et al., (1983) in Genetic Engineering of Plants, T. Kosuge, C. Meredith and A. Hollaender (eds.), Plenum Press, pp. 211-227).

[0155] Promoters useful with this invention can include, for example, constitutive, inducible, temporally regulated, developmentally regulated, chemically regulated, tissue-preferred and/or tissue-specific promoters for use in the preparation of recombinant nucleic acid molecules, e.g., “synthetic nucleic acid constructs” or “protein-RNA complex.” These various types of promoters are known in the art.

[0156] The choice of promoter may vary depending on the temporal and spatial requirements for expression, and also may vary based on the host cell to be transformed. Promoters for many different organisms are well known in the art. Based on the extensive knowledge present in the art, the appropriate promoter can be selected for the particular host organism of interest. Thus, for example, much is known about promoters upstream of highly constitutively expressed genes in model organisms and such knowledge can be readily accessed and implemented in other systems as appropriate.

[0157] In some embodiments, a promoter functional in a plant may be used with the constructs of this invention. Non-limiting examples of a promoter useful for driving expression in a plant include the promoter of the RubisCo small subunit gene 1 (PrbcS1), the promoter of the actin gene (Pactin), the promoter of the nitrate reductase gene (Pnr) and the promoter of duplicated carbonic anhydrase gene 1 (Pdcal) (See, Walker et al. Plant Cell Rep. 23:727-735 (2005); Li et al. Gene 403:132-142 (2007); Li et al. Mol Biol. Rep. 37:1143-1154 (2010)). PrbcS1 and Pactin are constitutive promoters and Pnr and Pdcal are inducible promoters. Pnr is induced by nitrate and repressed by ammonium (Li et al. Gene 403:132-142 (2007)) and Pdcal is induced by salt (Li et al. Mol Biol. Rep. 37:1143-1154 (2010)). In some embodiments, a promoter useful with this invention is RNA polymerase II (Pol II) promoter. In some embodiments, a U6 promoter or a 7SL promoter from Zea mays may be useful with constructs of this invention. In some embodiments, the U6c promoter and/or 7SL promoter from Zea mays may be useful for driving expression of a guide nucleic acid. In some embodiments, a U6c promoter, U6i promoter and/or 7SL promoter from Glycine max may be useful with constructs of this invention. In some embodiments, the U6c promoter, U6i promoter and/or 7SL promoter from Glycine max may be useful for driving expression of a guide nucleic acid.

[0158] Examples of constitutive promoters useful for plants include, but are not limited to, cestrum virus promoter (cmp) (U.S. Pat. No. 7,166,770), the rice actin 1 promoter (Wang et al. (1992) Mol. Cell. Biol. 12:3399-3406; as well as U.S. Pat. No. 5,641,876), CaMV 35S promoter (Odell et al. (1985) Nature 313:810-812), CaMV 19S promoter (Lawton et al. (1987) Plant Mol. Biol. 9:315-324), nos promoter (Ebert et al. (1987) Proc. Natl. Acad. Sci USA 84:5745-5749), Adh promoter (Walker et al. (1987) Proc. Natl. Acad. Sci. USA 84:6624-6629), sucrose synthase promoter (Yang & Russell (1990) Proc. Natl. Acad. Sci. USA 87:4144-4148), and the ubiquitin promoter. The constitutive promoter derived from ubiquitin accumulates in many cell types. Ubiquitin promoters have been cloned from several plant species for use in transgenic plants, for example, sunflower (Binet et al., 1991. Plant Science 79: 87-94), maize (Christensen et al., 1989. Plant Molec. Biol. 12: 619-632), and Arabidopsis (Norris et al. 1993. Plant Molec. Biol. 21:895-906). The maize ubiquitin promoter (UbiP) has been developed in transgenic monocot systems and its sequence and vectors constructed for monocot transformation are disclosed in the patent publication EP 0 342 926. The ubiquitin promoter is suitable for the expression of the nucleotide sequences of the invention in transgenic plants, especially monocotyledons. Further, the promoter expression cassettes described by McElroy et al. (Mol. Gen. Genet. 231: 150-160 (1991)) can be easily modified for the expression of the nucleotide sequences of the invention and are particularly suitable for use in monocotyledonous hosts.

[0159] In some embodiments, tissue specific/tissue preferred promoters can be used for expression of a heterologous polynucleotide in a plant cell. Tissue specific or preferred expression patterns include, but are not limited to, green tissue specific or preferred, root specific or preferred, stem specific or preferred, flower specific or preferred or pollen specific or preferred.

[0160] Promoters suitable for expression in green tissue include many that regulate genes involved in photosynthesis and many of these have been cloned from both monocotyledons and dicotyledons. In one embodiment, a promoter useful with the invention is the maize PEPC promoter from the phosphoenol carboxylase gene (Hudspeth & Grula, Plant Molec. Biol. 12:579-589 (1989)). Non-limiting examples of tissue-specific promoters include those associated with genes encoding the seed storage proteins (such as β-conglycinin, cruciferin, napin and phaseolin), zein or oil body proteins (such as oleosin), or proteins involved in fatty acid biosynthesis (including acyl carrier protein, stearoyl-ACP desaturase and fatty acid desaturases (fad 2-1)), and other nucleic acids expressed during embryo development (such as Bce4, see, e.g., Kridl et al. (1991) Seed Sci. Res. 1:209-219; as well as EP Patent No. 255378). Tissue-specific or tissue-preferential promoters useful for the expression of the nucleotide sequences of the invention in plants, particularly maize, include but are not limited to those that direct expression in root, pith, leaf or pollen. Such promoters are disclosed, for example, in WO 93/07278, herein incorporated by reference in its entirety. Other non-limiting examples of tissue specific or tissue preferred promoters useful with the invention the cotton rubisco promoter disclosed in U.S. Pat. No. 6,040,504; the rice sucrose synthase promoter disclosed in U.S. Pat. No. 5,604,121; the root specific promoter described by de Framond (FEBS 290:103-106 (1991); EP 0 452 269 to Ciba-Geigy); the stem specific promoter described in U.S. Pat. No. 5,625,136 (to Ciba-Geigy) and which drives expression of the maize trpA gene; the cestrum yellow leaf curling virus promoter disclosed in WO 01/73087; and pollen specific or preferred promoters including, but not limited to, ProOsLPS10 and ProOsLPS11 from rice (Nguyen et al. Plant Biotechnol. Reports 9(5):297-306 (2015)), ZmSTK2_USP from maize (Wang et al. Genome 60(6):485-495 (2017)), LAT52 and LAT59 from tomato (Twell et al. Development 109(3):705-713 (1990)), Zm13 (U.S. Pat. No. 10,421,972), PLA₂-δ promoter from Arabidopsis (U.S. Pat. No. 7,141,424), and/or the ZmC5 promoter from maize (International PCT Publication No. WO1999/042587.

[0161] Additional examples of plant tissue-specific/tissue preferred promoters include, but are not limited to, the root hair-specific cis-elements (RHEs) (Kim et al. The Plant Cell 18:2958-2970 (2006)), the root-specific promoters RCc3 (Jeong et al. Plant Physiol. 153:185-197 (2010)) and RB7 (U.S. Pat. No. 5,459,252), the lectin promoter (Lindstrom et al. (1990) Der. Genet. 11:160-167; and Vodkin (1983) Prog. Clin. Biol. Res. 138:87-98), corn alcohol dehydrogenase 1 promoter (Dennis et al. (1984) Nucleic Acids Res. 12:3983-4000), S-adenosyl-L-methionine synthetase (SAMS) (Vander Mijnsbrugge et al. (1996) Plant and Cell Physiology, 37(8):1108-1115), corn light harvesting complex promoter (Bansal et al. (1992) Proc. Natl. Acad. Sci. USA 89:3654-3658), corn heat shock protein promoter (O'Dell et al. (1985) EMBO J. 5:451-458; and Rochester et al. (1986) EMBO J. 5:451-458), pea small subunit RuBP carboxylase promoter (Cashmore, “Nuclear genes encoding the small subunit of ribulose-1,5-bisphosphate carboxylase” pp. 29-39 In: Genetic Engineering of Plants (Hollaender ed., Plenum Press 1983; and Poulsen et al. (1986) Mol. Gen. Genet. 205:193-200), Ti plasmid mannopine synthase promoter (Langridge et al. (1989) Proc. Natl. Acad. Sci. USA 86:3219-3223), Ti plasmid nopaline synthase promoter (Langridge et al. (1989), supra), petunia chalcone isomerase promoter (van Tunen et al. (1988) EMBO J. 7:1257-1263), bean glycine rich protein 1 promoter (Keller et al. (1989) Genes Dev. 3:1639-1646), truncated CaMV 35S promoter (O'Dell et al. (1985) Nature 313:810-812), potato patatin promoter (Wenzler et al. (1989) Plant Mol. Biol. 13:347-354), root cell promoter (Yamamoto et al. (1990) Nucleic Acids Res. 18:7449), maize zein promoter (Kriz et al. (1987) Mol. Gen. Genet. 207:90-98; Langridge et al. (1983) Cell 34:1015-1022; Reina et al. (1990) Nucleic Acids Res. 18:6425; Reina et al. (1990) Nucleic Acids Res. 18:7449; and Wandelt et al. (1989) Nucleic Acids Res. 17:2354), globulin-1 promoter (Belanger et al. (1991) Genetics 129:863-872), α-tubulin cab promoter (Sullivan et al. (1989)Mol. Gen. Genet. 215:431-440), PEPCase promoter (Hudspeth & Grula (1989) Plant Mol. Biol. 12:579-589), R gene complex-associated promoters (Chandler et al. (1989) Plant Cell 1:1175-1183), and chalcone synthase promoters (Franken et al. (1991) EMBO J. 10:2605-2612).

[0162] Useful for seed-specific expression is the pea vicilin promoter (Czako et al. (1992) Mol. Gen. Genet. 235:33-40; as well as the seed-specific promoters disclosed in U.S. Pat. No. 5,625,136. Useful promoters for expression in mature leaves are those that are switched at the onset of senescence, such as the SAG promoter from Arabidopsis (Gan et al. (1995) Science 270:1986-1988).

[0163] In addition, promoters functional in chloroplasts can be used. Non-limiting examples of such promoters include the bacteriophage T3 gene 9 5′ UTR and other promoters disclosed in U.S. Pat. No. 7,579,516. Other promoters useful with the invention include but are not limited to the S-E9 small subunit RuBP carboxylase promoter and the Kunitz trypsin inhibitor gene promoter (Kti3).

[0164] Additional regulatory elements useful with this invention include, but are not limited to, introns, enhancers, termination sequences and/or 5′ and 3′ untranslated regions.

[0165] An intron useful with this invention can be an intron identified in and isolated from a plant and then inserted into an expression cassette to be used in transformation of a plant. As would be understood by those of skill in the art, introns can comprise the sequences required for self-excision and are incorporated into nucleic acid constructs/expression cassettes in frame. An intron can be used either as a spacer to separate multiple protein-coding sequences in one nucleic acid construct, or an intron can be used inside one protein-coding sequence to, for example, stabilize the mRNA. If they are used within a protein-coding sequence, they are inserted “in-frame” with the excision sites included. Introns may also be associated with promoters to improve or modify expression. As an example, a promoter/intron combination useful with this invention includes but is not limited to that of the maize Ubi1 promoter and intron (see, e.g., SEQ ID NO:21 and SEQ ID NO:22).

[0166] Non-limiting examples of introns useful with the present invention include introns from the ADHI gene (e.g., Adh1-S introns 1, 2 and 6), the ubiquitin gene (Ubi1), the RuBisCO small subunit (rbcS) gene, the RuBisCO large subunit (rbcL) gene, the actin gene (e.g., actin-1 intron), the pyruvate dehydrogenase kinase gene (pdk), the nitrate reductase gene (nr), the duplicated carbonic anhydrase gene 1 (Tdca1), the psbA gene, the atpA gene, or any combination thereof.

[0167] In some embodiments, a polynucleotide and/or a nucleic acid construct of the invention can be an “expression cassette” or can be comprised within an expression cassette. As used herein, “expression cassette” means a recombinant nucleic acid molecule comprising, for example, a one or more polynucleotides of the invention (e.g., a polynucleotide encoding a sequence-specific nucleic acid binding domain, a polynucleotide encoding a deaminase protein or domain, a polynucleotide encoding a reverse transcriptase protein or domain, a polynucleotide encoding a 5′-3′ exonuclease polypeptide or domain, a guide nucleic acid and/or reverse transcriptase (RT) template), wherein polynucleotide(s) is/are operably associated with one or more control sequences (e.g., a promoter, terminator and the like). Thus, in some embodiments, one or more expression cassettes may be provided, which are designed to express, for example, a nucleic acid construct of the invention (e.g., a polynucleotide encoding a sequence-specific nucleic acid binding domain, a polynucleotide encoding a nuclease polypeptide/domain, a polynucleotide encoding a deaminase protein/domain, a polynucleotide encoding a reverse transcriptase protein/domain, a polynucleotide encoding a 5′-3′ exonuclease polypeptide/domain, a polynucleotide encoding a peptide tag, and/or a polynucleotide encoding an affinity polypeptide, and the like, or comprising a guide nucleic acid, an extended guide nucleic acid, and/or RT template, and the like). When an expression cassette of the present invention comprises more than one polynucleotide, the polynucleotides may be operably linked to a single promoter that drives expression of all of the polynucleotides or the polynucleotides may be operably linked to one or more separate promoters (e.g., three polynucleotides may be driven by one, two or three promoters in any combination). When two or more separate promoters are used, the promoters may be the same promoter or they may be different promoters. Thus, a polynucleotide encoding a sequence specific nucleic acid binding domain, a polynucleotide encoding a nuclease protein/domain, a polynucleotide encoding a CRISPR-Cas effector protein/domain, a polynucleotide encoding an deaminase protein/domain, a polynucleotide encoding a reverse transcriptase polypeptide/domain (e.g., RNA-dependent DNA polymerase), and/or a polynucleotide encoding a 5′-3′ exonuclease polypeptide/domain, a guide nucleic acid, an extended guide nucleic acid and/or RT template when comprised in a single expression cassette may each be operably linked to a single promoter, or separate promoters in any combination.

[0168] An expression cassette comprising a nucleic acid construct of the invention may be chimeric, meaning that at least one of its components is heterologous with respect to at least one of its other components (e.g., a promoter from the host organism operably linked to a polynucleotide of interest to be expressed in the host organism, wherein the polynucleotide of interest is from a different organism than the host or is not normally found in association with that promoter). An expression cassette may also be one that is naturally occurring but has been obtained in a recombinant form useful for heterologous expression.

[0169] An expression cassette can optionally include a transcriptional and/or translational termination region (i.e., termination region) and/or an enhancer region that is functional in the selected host cell. A variety of transcriptional terminators and enhancers are known in the art and are available for use in expression cassettes. Transcriptional terminators are responsible for the termination of transcription and correct mRNA polyadenylation. A termination region and/or the enhancer region may be native to the transcriptional initiation region, may be native to, for example, a gene encoding a sequence-specific nucleic acid binding protein, a gene encoding a nuclease, a gene encoding a reverse transcriptase, a gene encoding a deaminase, and the like, or may be native to a host cell, or may be native to another source (e.g., foreign or heterologous to, for example, to a promoter, to a gene encoding a sequence-specific nucleic acid binding protein, a gene encoding a nuclease, a gene encoding a reverse transcriptase, a gene encoding a deaminase, and the like, or to the host cell, or any combination thereof).

[0170] An expression cassette of the invention also can include a polynucleotide encoding a selectable marker, which can be used to select a transformed host cell. As used herein, “selectable marker” means a polynucleotide sequence that when expressed imparts a distinct phenotype to the host cell expressing the marker and thus allows such transformed cells to be distinguished from those that do not have the marker. Such a polynucleotide sequence may encode either a selectable or screenable marker, depending on whether the marker confers a trait that can be selected for by chemical means, such as by using a selective agent (e.g., an antibiotic and the like), or on whether the marker is simply a trait that one can identify through observation or testing, such as by screening (e.g., fluorescence). Many examples of suitable selectable markers are known in the art and can be used in the expression cassettes described herein.

[0171] In addition to expression cassettes, the nucleic acid molecules/constructs and polynucleotide sequences described herein can be used in connection with vectors. The term “vector” refers to a composition for transferring, delivering or introducing a nucleic acid (or nucleic acids) into a cell. A vector comprises a nucleic acid construct (e.g., expression cassette(s)) comprising the nucleotide sequence(s) to be transferred, delivered or introduced. Vectors for use in transformation of host organisms are well known in the art. Non-limiting examples of general classes of vectors include viral vectors, plasmid vectors, phage vectors, phagemid vectors, cosmid vectors, fosmid vectors, bacteriophages, artificial chromosomes, minicircles, or Agrobacterium binary vectors in double or single stranded linear or circular form which may or may not be self-transmissible or mobilizable. In some embodiments, a viral vector can include, but is not limited, to a retroviral, lentiviral, adenoviral, adeno-associated, or herpes simplex viral vector. A vector as defined herein can transform a prokaryotic or eukaryotic host either by integration into the cellular genome or exist extrachromosomally (e.g., autonomous replicating plasmid with an origin of replication). Additionally included are shuttle vectors by which is meant a DNA vehicle capable, naturally or by design, of replication in two different host organisms, which may be selected from actinomycetes and related species, bacteria and eukaryotic (e.g., higher plant, mammalian, yeast or fungal cells). In some embodiments, the nucleic acid in the vector is under the control of, and operably linked to, an appropriate promoter or other regulatory elements for transcription in a host cell. The vector may be a bi-functional expression vector which functions in multiple hosts. In the case of genomic DNA, this may contain its own promoter and/or other regulatory elements and in the case of cDNA this may be under the control of an appropriate promoter and/or other regulatory elements for expression in the host cell. Accordingly, a nucleic acid or polynucleotide of this invention and/or expression cassettes comprising the same may be comprised in vectors as described herein and as known in the art.

[0172] As used herein, “contact,” “contacting,” “contacted,” and grammatical variations thereof, refer to placing the components of a desired reaction together under conditions suitable for carrying out the desired reaction (e.g., transformation, transcriptional control, genome editing, nicking, and/or cleavage). As an example, a target nucleic acid may be contacted with a sequence-specific nucleic acid binding protein (e.g., polynucleotide-guided endonuclease, a CRISPR-Cas endonuclease (e.g., CRISPR-Cas effector protein), a zinc finger nuclease, a transcription activator-like effector nuclease (TALEN) and/or an Argonaute protein)) and a deaminase or a nucleic acid construct encoding the same, under conditions whereby the sequence-specific nucleic acid binding protein, the reverse transcriptase and the deaminase are expressed and the sequence-specific nucleic acid binding protein binds to the target nucleic acid, and the reverse transcriptase and/or deaminase may be fused to either the sequence-specific nucleic acid binding protein or recruited to the sequence-specific nucleic acid binding protein (via, for example, a peptide tag fused to the sequence-specific nucleic acid binding protein and an affinity tag fused to the reverse transcriptase and/or deaminase) and thus, the deaminase and/or reverse transcriptase is positioned in the vicinity of the target nucleic acid, thereby modifying the target nucleic acid. Other methods for recruiting reverse transcriptase and/or deaminase may be used that take advantage of other protein-protein interactions. In addition, RNA-protein interactions and chemical interactions may be used for protein-protein and protein-nucleic acid recruitment.

[0173] As used herein, “modifying” or “modification” in reference to a target nucleic acid includes editing (e.g., mutating), covalent modification, exchanging/substituting nucleic acids/nucleotide bases, deleting, cleaving, nicking, and/or altering transcriptional control of a target nucleic acid. In some embodiments, a modification may include one or more single base changes (SNPs) of any type.

[0174] The term “regulating” as used in the context of a polypeptide “regulating” a phenotype, for example, a balance between inactive and active cytokinins in a plant, means the ability of the polypeptide to affect the expression of a gene or genes such that a phenotype such as the cytokinin balance is modified.

[0175] “Introducing,” “introduce,” “introduced” (and grammatical variations thereof) in the context of a polynucleotide of interest means presenting a nucleotide sequence of interest (e.g., polynucleotide, RT template, a nucleic acid construct, and/or a guide nucleic acid) to a plant, plant part thereof, or cell thereof, in such a manner that the nucleotide sequence gains access to the interior of a cell.

[0176] The terms “transformation” or transfection” may be used interchangeably and as used herein refer to the introduction of a heterologous nucleic acid into a cell. Transformation of a cell may be stable or transient. Thus, in some embodiments, a host cell or host organism (e.g., a plant) may be stably transformed with a polynucleotide/nucleic acid molecule of the invention. In some embodiments, a host cell or host organism may be transiently transformed with a polynucleotide/nucleic acid molecule of the invention.

[0177] “Transient transformation” in the context of a polynucleotide means that a polynucleotide is introduced into the cell and does not integrate into the genome of the cell.

[0178] By “stably introducing” or “stably introduced” in the context of a polynucleotide introduced into a cell is intended that the introduced polynucleotide is stably incorporated into the genome of the cell, and thus the cell is stably transformed with the polynucleotide.

[0179] “Stable transformation” or “stably transformed” as used herein means that a nucleic acid molecule is introduced into a cell and integrates into the genome of the cell. As such, the integrated nucleic acid molecule is capable of being inherited by the progeny thereof, more particularly, by the progeny of multiple successive generations. “Genome” as used herein includes the nuclear and the plastid genome, and therefore includes integration of the nucleic acid into, for example, the chloroplast or mitochondrial genome. Stable transformation as used herein can also refer to a transgene that is maintained extrachromosomally, for example, as a minichromosome or a plasmid.

[0180] Transient transformation may be detected by, for example, an enzyme-linked immunosorbent assay (ELISA) or Western blot, which can detect the presence of a peptide or polypeptide encoded by one or more transgene introduced into an organism. Stable transformation of a cell can be detected by, for example, a Southern blot hybridization assay of genomic DNA of the cell with nucleic acid sequences which specifically hybridize with a nucleotide sequence of a transgene introduced into an organism (e.g., a plant). Stable transformation of a cell can be detected by, for example, a Northern blot hybridization assay of RNA of the cell with nucleic acid sequences which specifically hybridize with a nucleotide sequence of a transgene introduced into a host organism. Stable transformation of a cell can also be detected by, e.g., a polymerase chain reaction (PCR) or other amplification reactions as are well known in the art, employing specific primer sequences that hybridize with target sequence(s) of a transgene, resulting in amplification of the transgene sequence, which can be detected according to standard methods Transformation can also be detected by direct sequencing and/or hybridization protocols well known in the art.

[0181] Accordingly, in some embodiments, nucleotide sequences, polynucleotides, nucleic acid constructs, and/or expression cassettes of the invention may be expressed transiently and/or they can be stably incorporated into the genome of the host organism. Thus, in some embodiments, a nucleic acid construct of the invention (e.g., one or more expression cassettes comprising polynucleotides for editing as described herein) may be transiently introduced into a cell with a guide nucleic acid and as such, no DNA is maintained in the cell.

[0182] A nucleic acid construct of the invention may be introduced into a plant cell by any method known to those of skill in the art. Non-limiting examples of transformation methods include transformation via bacterial-mediated nucleic acid delivery (e.g., via Agrobacteria), viral-mediated nucleic acid delivery, silicon carbide or nucleic acid whisker-mediated nucleic acid delivery, liposome mediated nucleic acid delivery, microinjection, microparticle bombardment, calcium-phosphate-mediated transformation, cyclodextrin-mediated transformation, electroporation, nanoparticle-mediated transformation, sonication, infiltration, PEG-mediated nucleic acid uptake, as well as any other electrical, chemical, physical (mechanical) and/or biological mechanism that results in the introduction of nucleic acid into the plant cell, including any combination thereof. Procedures for transforming both eukaryotic and prokaryotic organisms are well known and routine in the art and are described throughout the literature (See, for example, Jiang et al. 2013. Nat. Biotechnol. 31:233-239; Ran et al. Nature Protocols 8:2281-2308 (2013)). General guides to various plant transformation methods known in the art include Miki et al. (“Procedures for Introducing Foreign DNA into Plants” in Methods in Plant Molecular Biology and Biotechnology, Glick, B. R. and Thompson, J. E., Eds. (CRC Press, Inc., Boca Raton, 1993), pages 67-88) and Rakowoczy-Trojanowska (Cell. Mol. Biol. Lett. 7:849-858 (2002)).

[0183] In some embodiments of the invention, transformation of a cell may comprise nuclear transformation. In other embodiments, transformation of a cell may comprise plastid transformation (e.g., chloroplast transformation). In still further embodiments, nucleic acids of the invention may be introduced into a cell via conventional breeding techniques. In some embodiments, one or more of the polynucleotides, expression cassettes and/or vectors may be introduced into a plant cell via Agrobacterium transformation.

[0184] A polynucleotide therefore can be introduced into a plant, plant part, plant cell in any number of ways that are well known in the art. The methods of the invention do not depend on a particular method for introducing one or more nucleotide sequences into a plant, only that they gain access to the interior the cell. Where more than polynucleotide is to be introduced, they can be assembled as part of a single nucleic acid construct, or as separate nucleic acid constructs, and can be located on the same or different nucleic acid constructs. Accordingly, the polynucleotide can be introduced into the cell of interest in a single transformation event, or in separate transformation events, or, alternatively, a polynucleotide can be incorporated into a plant as part of a breeding protocol.

[0185] Cytokinins are phytohormones that are involved in numerous physiological processes in plants and their levels may be a target for modification of yield in plants. For example, cytokinin oxidase (CKX) activity in plants is increased during times of abiotic stress, which leads to an increase in inactive cytokinins and decreased plant productivity. Targeted manipulation of the cytokinin balance (e.g., relative balance of active and inactive cytokinins) in targeted tissue types and developmental stages through modification of endogenous genes encoding CKX polypeptides may provide increased productivity (e.g., improved yield traits). CKX is a flavoprotein in which the FAD cofactor is covalently linked to a histidine residue. Such increased productivity may be possible even under abiotic stress conditions, through mechanisms such as increased cell division, induction of stomatal opening, inhibited senescence of organs, and/or suppression of apical dominance.

[0186] Accordingly, in some embodiments, the present invention is directed to generating mutations in endogenous CKX genes, optionally wherein the mutation results in the production of an altered amount of CKX polypeptide, a truncated CKX polypeptide or no CKX polypeptide. In some embodiments, a mutation in an endogenous CKX gene or two or more endogenous CKX genes can result in modifying the balance between inactive cytokinins versus active cytokinins in favor of active cytokinins, thereby improving yield traits in the plant. Thus, in some embodiments, the mutations as described herein result in an increase in the supply of active cytokinin to a tissue of interest, e.g., in the reproductive organs of a plant. In some embodiments, supply of active cytokinin to a tissue may be increased or altered (e.g., increased or decreased) during particular stages of development or in a particular tissue type.

[0187] In some embodiments, the present invention provides a plant or plant part thereof comprising at least one non-natural mutation in at least one endogenous Cytokinin Oxidase/Dehydrogenase (CKX) gene encoding a CKX protein. In some embodiments, a mutation in an endogenous CKX gene results in an inactive CKX polypeptide. In some embodiments, a mutation in the promoter (e.g., promoter bashing) of an endogenous CKX gene may result in modified (increased/decreased) expression of the CKX gene, and therefore an increased amount of the CKX polypeptide. In some embodiments, a mutation in an endogenous CKX gene may result in reduced expression of the gene as compared to a WT CKX gene, and therefore a reduced amount of a null or inactive CKX polypeptide. In some embodiments, a mutated CKX gene as described herein may have the same level of expression as the WT CKX gene, but the mutated CKX gene produces a null or inactive CKX polypeptide. In some embodiments, the CKX gene is a CKX1 gene, a CKX2 gene, a CKX3 gene, a CKX4 gene, a CKX5 gene, and/or a CKX6 gene. In some embodiments, the at least one non-natural mutation is a mutation in two or more CKX genes (e.g., 2, 3, 4, 5, or 6 CKX genes), e.g., a mutation in two or more of a CKX1 gene, a CKX2 gene, a CKX3 gene, a CKX4 gene, a CKX5 gene, and/or a CKX6 gene, in any combination. In some embodiments, the at least one non-natural mutation is a mutation in at least three (e.g., 3, 4, 5, or 6) of the endogenous CKX genes of CKX1, CKX2, CKX3, CKX4, CKX5 and/or CKX6 gene, in any combination. In some embodiments, a plant or plant part thereof comprising at least one non-natural mutation in at least one endogenous CKX gene encoding a CKX protein comprises a mutation (a) in an endogenous CKX1 gene, an endogenous CKX2 gene, and an endogenous CKX3 gene; (b) in an endogenous CKX1 gene, an endogenous CKX3, an endogenous CKX5 gene, and an endogenous CKX6 gene; or (c) in an endogenous CKX1 gene, an endogenous CKX2 gene, an endogenous CKX3 gene, and an endogenous CKX4 gene.

[0188] In some embodiments, a plant comprising at least one non-natural mutation in at least one endogenous CKX gene encoding a CKX protein has improved yield traits compared to an isogenic plant (e.g., wild type unedited plant or a null segregant) that does not comprise the mutation.

[0189] In some embodiments, an endogenous CKX gene: (a) comprises a sequence having at least 80% sequence identity to any one of the nucleotide sequences of SEQ ID NOs:72, 73, 75, 76, 78, 79, 81, 82, 84, 87, 88, or 91; (b) comprises a region having at least 80% sequence identity to any one of the nucleotide sequences of SEQ ID NOs:93-98; and/or (c) encodes a polypeptide having at least 80% identity to any one of the amino acid sequences of SEQ ID NOs: 74, 77, 80, 83, 89, or 92. In some embodiments, an endogenous CKX gene is a CKX1 gene that (a) comprises a sequence having at least 80% sequence identity to the nucleotide sequence of SEQ ID NO:72 or SEQ ID NO:73; (b) comprises a region having at least 80% sequence identity to any one of the nucleotide sequences of SEQ ID NO:93; and/or (c) encodes a polypeptide comprising a sequence having at least 80% sequence identity to the amino acid sequence of SEQ ID NO:74. In some embodiments, an endogenous CKX gene is a CKX2 gene that (a) comprises a sequence having at least 80% sequence identity to the nucleotide sequence of SEQ ID NO:75 or SEQ ID NO:76; (b) comprises a region having at least 80% sequence identity to the nucleotide sequence of SEQ ID NO:94; and/or (c) encodes a polypeptide comprising a sequence having at least 80% sequence identity to the amino acid sequence of SEQ ID NO:77. In some embodiments, an endogenous CKX gene is a CKX3 gene that (a) comprises a sequence having at least 80% sequence identity to the nucleotide sequence of SEQ ID NO:78 or SEQ ID NO:79; (b) comprises a region having at least 80% sequence identity to the nucleotide sequence of SEQ ID NO:95; and/or (c) encodes a polypeptide comprising a sequence having at least 80% sequence identity to the amino acid sequence of SEQ ID NO:80. In some embodiments, an endogenous CKX gene is a CKX4 gene that (a) comprises a sequence having at least 80% sequence identity to the nucleotide sequence of SEQ ID NO:81 or SEQ ID NO:82; (b) comprises a region having at least 80% sequence identity to the nucleotide sequence of SEQ ID NO:96; and/or (c) encodes a polypeptide comprising a sequence having at least 80% sequence identity to the amino acid sequence of SEQ ID NO:83. In some embodiments, an endogenous CKX gene is a CKX5 gene that (a) comprises a sequence having at least 80% sequence identity to the nucleotide sequence of SEQ ID NO:84 or SEQ ID NO:91; (b) comprises a region having at least 80% sequence identity to the nucleotide sequence of SEQ ID NO:97; and/or (c) encodes a polypeptide comprising a sequence having at least 80% sequence identity to the amino acid sequence of SEQ ID NO:92. In some embodiments, an endogenous CKX gene is a CKX6 gene that (a) comprises a sequence having at least 80% sequence identity to the nucleotide sequence of SEQ ID NO:87 or SEQ ID NO:88; (b) comprises a region having at least 80% sequence identity to the nucleotide sequence of SEQ ID NO:98; and/or (c) encodes a polypeptide comprising a sequence having at least 80% sequence identity to the amino acid sequence of SEQ ID NO:89.

[0190] Thus, in some embodiments, a plant or plant part of the invention comprises at least one non-natural mutation in an endogenous CKX gene, wherein the endogenous CKX gene (a) comprises a sequence having at least 80% sequence identity to any one of the nucleotide sequences of SEQ ID NOs:72, 73, 75, 76, 78, 79, 81, 82, 84, 87, 88, or 91; (b) comprises a region having at least 80% sequence identity to any one of the nucleotide sequences of SEQ ID NOs:93-98; and/or (c) encodes a polypeptide having at least 80% identity to any one of the amino acid sequences of SEQ ID NOs: 74, 77, 80, 83, 89, or 92.

[0191] A non-natural mutation in an endogenous Cytokinin Oxidase/Dehydrogenase (CKX) gene in a plant may be any type of mutation including, but not limited to, a point mutation, a base substitution, a base deletion and/or a base insertion, optionally wherein the at least one non-natural mutation results in a premature stop codon. In some embodiments, a plant comprising an endogenous CKX gene that has at least one non-natural mutation in a CKX gene as described herein exhibits improved yield traits as compared to a plant that does not comprise the at least one non-natural mutation in a CKX gene.

[0192] A mutation useful with this invention can include, but is not limited to, a substitution, a deletion and/or an insertion of one or more bases of the CKX gene or a deletion or substitution of one or more amino acid residues of the CKX polypeptide. In some embodiments, the at least one non-natural mutation results in a premature stop codon. In some embodiments, at least one non-natural mutation may comprise a base substitution to an A, a T, a G, or a C, which results in premature stop codon, thereby generating a truncated CKX polypeptide. In some embodiments, a premature stop codon results in a truncation of the CKX polypeptide such that no CKX polypeptide is produced. In some embodiments, a mutation in an endogenous CKX gene may result in altered expression (e.g., increased or decreased expression) of the gene as compared to a wild type CKX gene, and therefore an altered amount of the CKX polypeptide compared to the corresponding wild type CKX gene (e.g., the CKX gene not modified as described herein). In some embodiments, a mutation in the promoter (e.g., promoter bashing) of an endogenous CKX gene may result in modified (increased/decreased) expression of the CKX gene, and therefore an increased amount of the CKX polypeptide. In some embodiments, a mutation in an endogenous CKX gene may result in reduced expression of the gene as compared to a wild type CKX gene, and therefore a reduced amount of the CKX polypeptide that is a null or inactive polypeptide. In some embodiments, a mutated CKX gene as described herein may have the same expression level as the wild type CKX gene, but the mutated CKX gene produces a null or inactive CKX polypeptide.

[0193] In some embodiments, the at least one non-natural mutation in an endogenous CKX gene may be a deletion (e.g., a deletion of one or more consecutive base pairs, e.g., at least 1, 2, 3, 4, 5, 6, 7, 8, 9, 10, 11, 12, 13, 14, 15, 16, 17, 18, 19, 20, 21, 22, 23, 24, 25, 26, 27, 28, 29, 30, 31, 32, 33, 34, 35, 36, 37, 38, 39, 40, 41, 42, 43, 44, 45, 46, 47, 48, 49, 50, 55, 60, 65, 70, 75, 80, 85, 90, 100, 200, 300, 400, 500, 600, 700, 800, 900, 1000, 1500, 2000, 2500, 3000, 3500, 4000, 4500, 5000, 6000, 7000, or 8000 or more consecutive base pairs of any one of SEQ ID NOs: 72, 73, 75, 76, 78, 79, 81, 82, 84, 87, 88, or 91). In some embodiments, an endogenous CKX gene comprises a deletion of at least one or two or more consecutive base pairs, or at least three consecutive base pairs. In some embodiments, an endogenous CKX gene comprises a deletion of at least one base pair that results in a truncated CKX polypeptide (e.g., C-terminal truncation) or no CKX polypeptide.

[0194] In some embodiments, at least one non-natural mutation may produce a dominant negative mutation, a semi-dominant mutation, a weak loss-of-function mutation, a hypomorphic mutation, or a null mutation. In some embodiments, the at least one non-natural mutation is a null mutation. In some embodiments, the at least one non-natural mutation is a dominant negative mutation. In some embodiments, the at least one non-natural mutation is a semi-dominant mutation. In some embodiments, a non-natural mutation in an endogenous gene encoding a CKX polypeptide useful with this invention may be a dominant recessive mutation. In some embodiments, a plant comprising the null mutation and/or the dominant negative mutation exhibits improved yield traits (e.g., increased pod production, increased seed production, increased seed size, increased seed weight, increased nodule number, increase nodule activity, and/or increased nitrogen fixation) as compared to a control plant (e.g., a plant not comprising the dominant negative mutation and/or null mutation).

[0195] In some embodiments, a plant cell comprising an editing system is provided, the editing system comprising: (a) a CRISPR-associated effector protein; and (b) a guide nucleic acid (gRNA, gDNA, crRNA, crDNA, sgRNA, sgDNA) comprising a spacer sequence with complementarity to an endogenous target gene encoding a CKX protein in the plant cell. In some embodiments, the editing system generates a mutation in the endogenous target gene encoding a CKX protein. The endogenous target gene encoding a CKX protein may be any CKX protein involved in (e.g., capable of influencing or regulating) the relative balance between active and inactive cytokinins (optionally increasing the active cytokinins relative to the inactive cytokinins) and may be modified to increase yield components such as pod production/number, seed production/number, seed size, and/or seed weight. In some embodiments, an endogenous target gene encoding a CKX protein is an endogenous CKX1 gene, an endogenous CKX2 gene, an endogenous CKX3 gene, an endogenous CKX4 gene, an endogenous CKX5 gene, or an endogenous CKX6 gene, or any combination thereof. In some embodiments, an endogenous gene encoding a CKX protein and to which the spacer sequence of the guide nucleic acid is complementary comprises a sequence having at least 80% sequence identity to any one of the nucleotide sequences of SEQ ID NOs: 72, 73, 75, 76, 78, 79, 81, 82, 84, 87, 88, or 91, and/or comprises a region having at least 80% sequence identity to any one of the nucleotide sequences of SEQ ID NOs:93-98. In some embodiments, CKX protein encoded by the endogenous gene comprises at least 80% sequence identity to any one of the amino acid sequences SEQ ID NOs:74, 77, 80, 83, 89, or 92. In some embodiments, a spacer sequence useful with this invention can include, but is not limited to, a nucleotide sequence of any one of SEQ ID NOs:99-113.

[0196] In some embodiments, a plant cell is provided comprising at least one non-natural mutation within an endogenous Cytokinin Oxidase/Dehydrogenase (CKX) gene that results in a null allele or knockout of the CKX gene, wherein the at least one non-natural mutation is a base substitution, base insertion or a base deletion that is introduced using an editing system that comprises a nucleic acid binding domain that binds to a target site in the CKX gene. In some embodiments, the nuclease is a zinc finger nuclease, a transcription activator-like effector nuclease (TALEN), an endonuclease (e.g., Fok1) or a CRISPR-Cas effector protein. In some embodiments, the nucleic acid binding domain of the editing system is from a polynucleotide-guided endonuclease, a CRISPR-Cas endonuclease (e.g., CRISPR-Cas effector protein), a zinc finger nuclease, a transcription activator-like effector nuclease (TALEN) and/or an Argonaute protein. In some embodiments, the endogenous CKX gene is a CKX1 gene, a CKX2 gene, a CKX3 gene, a CKX4 gene, a CKX5 gene, and/or a CKX6 gene, or any combination thereof, optionally wherein the at least one non-natural mutation is a mutation in at least two (e.g., 2, 3, 4, 5, or 6) different endogenous CKX genes, in any combination (e.g., any combination of at least two of CKX1, CKX2, CKX3, CKX4, CKX5 or CKX6). In some embodiments, the at least one non-natural mutation is a mutation in (a) in an endogenous CKX1 gene, an endogenous CKX2 gene, and an endogenous CKX3 gene; (b) in an endogenous CKX1 gene, an endogenous CKX3, an endogenous CKX5 gene, and an endogenous CKX6 gene; or (c) in an endogenous CKX1 gene, an endogenous CKX2 gene, an endogenous CKX3 gene, and an endogenous CKX4 gene.

[0197] In some embodiments, the endogenous CKX gene comprises a sequence having at least 80% sequence identity to any one of the nucleotide sequences of SEQ ID NOs:72, 73, 75, 76, 78, 79, 81, 82, 84, 87, 88, or 91, comprises a region having at least 80% sequence identity to any one of the nucleotide sequences of SEQ ID NOs:93-98 and/or encodes a polypeptide having at least 80% identity to any one of the amino acid sequences of SEQ ID NOs: 74, 77, 80, 83, 89, or 92. In some embodiments, a target site in a CKX gene is within a region of the CKX gene, the region comprising a sequence having at least 80% sequence identity to a sequence comprising: (a) about nucleotide 1884 to about nucleotide 2060 of the nucleotide sequence of SEQ ID NO:72 (CKX1) or about nucleotide 28 to about nucleotide 204 of the nucleotide sequence of SEQ ID NO:73 (CKX1) (e.g., SEQ ID NO:93); (b) about nucleotide 803 to about nucleotide 955 of the nucleotide sequence of SEQ ID NO:75 (CKX2) or about nucleotide 38 to about nucleotide 190 of the nucleotide sequence of SEQ ID NO:76 (CKX2) (e.g., SEQ ID NO:94); (c) about nucleotide 692 to about nucleotide 826 of the nucleotide sequence of SEQ ID NO:78 (CKX3) or about nucleotide 35 to about nucleotide 169 of the nucleotide sequence of SEQ ID NO:79 (CKX3) (e.g., SEQ ID NO:95); (d) about nucleotide 1540 to about nucleotide 1689 of the nucleotide sequence of SEQ ID NO:81 (CKX4) or about nucleotide 2 to about nucleotide 151 of the nucleotide sequence of SEQ ID NO:82 (CKX4) (e.g., SEQ ID NO:95); (e) about nucleotide 690 to about nucleotide 790 of the nucleotide sequence of SEQ ID NO:84 (CKX5), or about nucleotide 43 to about nucleotide 143 of the nucleotide sequence of SEQ ID NO:91 (CKX5) (e.g., SEQ ID NO:97); and/or (0 about nucleotide 1562 to about nucleotide 1709 of the nucleotide sequence of SEQ ID NO:87 (CKX6) or about nucleotide 31 to about nucleotide 178 (CKX6) of the nucleotide sequence of SEQ ID NO:88 (CKX6) (e.g., SEQ ID NO:98).

[0198] In some embodiments, the editing system further comprises a nuclease, and the nucleic acid binding domain binds to a target site in the CKX gene, wherein the CKX gene comprises a sequence having at least 80% sequence identity to any one of the nucleotide sequences of SEQ ID NOs:72, 73, 75, 76, 78, 79, 81, 82, 84, 87, 88, or 91, comprises a region having at least 80% sequence identity to any one of the nucleotide sequences of SEQ ID NOs:93-98, and/or encodes a polypeptide having at least 80% identity to any one of the amino acid sequences of SEQ ID NOs: 74, 77, 80, 83, 89, or 92, and the at least one non-natural mutation is made following cleavage by the nuclease. In some embodiments, the target site comprises a sequence having at least 80% sequence identity to any one of the nucleotide sequences of SEQ ID NOs:93-98.

[0199] In some embodiments, the at least one non-natural mutation is a point mutation. In some embodiments, a non-natural mutation can be a base substitution to an A, a T, a G, or a C, optionally wherein the base substitution results in an amino acid substitution. In some embodiments, the at least one non-natural mutation may be a base deletion or a base insertion of at least one or at least two (e.g., 2, 3, 4, 5, 6, 7, 8, 9, 10, 50, 100, 150, or 200 or more) consecutive bases. In some embodiments, the at least one non-natural mutation results in a deletion of all or a portion of the 5′ region of the CKX gene that results in a truncated CKX protein. In some embodiments, the at least one non-natural mutation results in a 3′ end truncation of the CKX gene, which produces a truncated CKX protein or no CKX protein. In some embodiments, the at least one non-natural mutation is a null allele or a dominant negative mutation.

[0200] Non-limiting examples of a plant or part thereof useful with this invention include corn, soy, canola, wheat, rice, cotton, sugarcane, sugar beet, barley, oats, alfalfa, sunflower, safflower, oil palm, sesame, coconut, tobacco, potato, sweet potato, cassava, coffee, apple, plum, apricot, peach, cherry, pear, fig, banana, citrus, cocoa, avocado, olive, almond, walnut, strawberry, watermelon, pepper, grape, tomato, cucumber, blackberry, raspberry, black raspberry, or a Brassica spp. In some embodiments, the plant or part thereof may be a soybean plant or part of a soybean plant.

[0201] In some embodiments, the plant part may be from a plant that includes, but is not limited to, corn, soy, canola, wheat, rice, cotton, sugarcane, sugar beet, barley, oats, alfalfa, sunflower, safflower, oil palm, sesame, coconut, tobacco, potato, sweet potato, cassava, coffee, apple, plum, apricot, peach, cherry, pear, fig, banana, citrus, cocoa, avocado, olive, almond, walnut, strawberry, watermelon, pepper, grape, tomato, cucumber, blackberry, raspberry, black raspberry or a Brassica spp. In some embodiments, a plant may be regenerated from a plant part of this invention including, for example, a cell. In some embodiments, a plant of this invention comprising at least one non-natural mutation in a CKX gene comprises improved yield traits.

[0202] In some embodiments, a soybean plant or part thereof is provided that comprises at least one non-natural mutation in an endogenous Cytokinin Oxidase/Dehydrogenase (CKX) gene having the gene identification number (gene ID) of Glyma15g18560, Glyma09g07360, Glyma17g06220, Glyma04g03130, Glyma09g35950 and/or Glyma09g07190.

[0203] Also provided herein is a method of providing a plurality of plants having improved yield traits (e.g., increased pod number, increased seed number, increased seed weight, increase nodule number, increase nodule activity, increase nitrogen fixation as a result of increase nodulation, or improved yield traits as a result of increased planting density), the method comprising planting two or more plants of the invention in a growing area, thereby providing a plurality of plants having improved yield traits as compared to a plurality of control plants not comprising the at least one non-natural mutation (e.g., as compared to an isogenic wild type plant not comprising the mutation). A growing area can be any area in which a plurality of plants can be planted together, including, but not limited to, a field (e.g., a cultivated field, an agricultural field), a growth chamber, a greenhouse, a recreational area, a lawn, and/or a roadside, and the like.

[0204] In some embodiments, a method of producing/breeding a transgene-free edited plant is provided, the method comprising: crossing a plant of the present invention (e.g., a plant comprising a mutation in a CKX gene and having improved yield traits, e.g., increased planting density, increased pod number, increased seed number (e.g., grain number), and/or increased seed weight (e.g., grain weight)) with a transgene free plant, thereby introducing the at least one non-natural mutation into the plant that is transgene-free (e.g., into progeny plants); and selecting a progeny plant that comprises the at least one non-natural mutation and is transgene-free, thereby producing a transgene free edited (e.g., base edited) plant.

[0205] In some embodiments, a method for editing a specific site in the genome of a plant cell is provided, the method comprising cleaving, in a site-specific manner, a target site within an endogenous Cytokinin Oxidase/Dehydrogenase (CKX) gene in the plant cell, wherein the endogenous CKX gene (a) comprises a sequence having at least 80% sequence identity to any one of the nucleotide sequences of SEQ ID NOs:72, 73, 75, 76, 78, 79, 81, 82, 84, 87, 88, or 91; (b) comprises a region having at least 80% sequence identity to any one of the nucleotide sequences of SEQ ID NOs:93-98; and/or (c) encodes a polypeptide having at least 80% sequence identity to any one of the amino acid sequences of SEQ ID NOs:74, 77, 80, 83, 89, or 92, thereby generating an edit in the endogenous CKX gene of the plant cell and producing a plant cell comprising an edit in the endogenous CKX gene. In some embodiments, a plant may be regenerated from the plant cell comprising the edit in the endogenous CKX gene to produce a plant comprising the edit in its genome (i.e., in its endogenous CKX gene). A plant comprising the edit in an endogenous CKX gene can exhibit improved yield traits compared to a control plant that does not comprise the edit in the endogenous CKX gene. In some embodiments, the endogenous CKX gene is a CKX1 gene, a CKX2 gene, a CKX3 gene, a CKX4 gene, a CKX5 gene, and/or a CKX6 gene, or any combination thereof. In some embodiments, a plant comprising the edit in the endogenous CKX gene comprises the edit in at least two (e.g., 2, 3, 4, 5, or 6) different endogenous CKX genes, in any combination (e.g., any combination of at least two of CKX1, CKX2, CKX3, CKX4, CKX5 or CKX6), optionally, wherein the edit is (a) in an endogenous CKX1 gene, an endogenous CKX2 gene, and an endogenous CKX3 gene; (b) in an endogenous CKX1 gene, an endogenous CKX3, an endogenous CKX5 gene, and an endogenous CKX6 gene; or (c) in an endogenous CKX1 gene, an endogenous CKX2 gene, an endogenous CKX3 gene, and an endogenous CKX4 gene.

[0206] In some embodiments, the edit results in a non-natural mutation, optionally wherein the non-natural mutation is a point mutation. In some embodiments, the edit produces at least one non-natural mutation that is a base insertion and/or a base deletion, optionally wherein the base deletion is a truncation that results in a C-terminal truncation of at least about 1 amino acid residue to about 540 amino acid residues (e.g., about 1, 2, 3, 4, 5, 6, 7, 8, 9, 10, 11, 12, 13, 14, 15, 20, 25, 30, 35, 40, 50, 60, 70, 80, 90, 100, 110, 120, 130, 140, 150, 160, 170, 180, 190, 191, 192, 193, 194, 195, 200, 210, 220, 225, 230, 240, 250, 275, 300, 325, 350, 400, 410, 420, 430, 435, 436, 437, 438, 439, 440, 450, 455, 460, 465, 470, 475, 476, 477, 478, 479, 480, 485, 486, 487, 488, 489, 490, 495, 500, 505, 510, 515, 520, 521, 523, 524, 525, 526, 527, 528, 529, 530, 531, 532, 534, 535, 536, 537, 538, 539, or 540 amino acid residue(s)) from the C-terminus of a CKX polypeptide, the CKX polypeptide having at least 80% sequence identity to any one of the amino acid sequences of SEQ ID NOs:74, 77, 80, 83, 89, or 92.

[0207] In some embodiments, a base deletion can result in a 3′ end truncation of the CKX gene from: (a) about nucleotide 1884, 1885, 1890, 1895, 1900, 1950, 2000, or 2050 to about nucleotide 7399 of the nucleotide sequence of SEQ ID NO:72 (CKX1) or about nucleotide 28, 29, 30, 35, 40, 45, 50, 60, 70, 80, 90, 100, 120, 140, 160, 180, 190, 200, 204, 205, 210, 215, or 220 to about nucleotide 1632 of the nucleotide sequence of SEQ ID NO:73 (CKX1); (b) about nucleotide 803, 804, 805, 810, 820, 830, 840, 850, 860, 870, 880, 890, 900, 910, 920, 930, 940, or 950 to about nucleotide 5917 of the nucleotide sequence of SEQ ID NO:75 (CKX2) or about nucleotide 38, 39, 40, 45, 50, 60, 70, 80, 90, 100, 120, 160, or 180 to about nucleotide 1647 of the nucleotide sequence of SEQ ID NO:76 (CKX2); (c) about nucleotide 692, 693, 694, 695, 700, 710, 720, 730, 740, 750, 760, 770, 780, 790, 800, 810 or 820 to about nucleotide 5768 of the nucleotide sequence of SEQ ID NO:78 (CKX3) or about nucleotide 35, 40, 50, 60, 70, 80, 90, 100, 110, 120, 130, 140, 150, or 160 to about nucleotide 1608 of the nucleotide sequence of SEQ ID NO:79 (CKX3); (d) about nucleotide 1540, 1550, 1560, 1570, 1580, 1590, 1600, 1610, 1620, 1630, 1640, 1650, 1660, 1670, or 1680 to about nucleotide 9725 of the nucleotide sequence of SEQ ID NO:81 (CKX4) or about nucleotide 2, 3, 4, 5, 10, 20, 30, 40, 50, 60, 70, 80, 90, 100, 110, 120, 130, 140, 150 to about nucleotide 1575 of the nucleotide sequence of SEQ ID NO:82 (CKX4); (e) about nucleotide 690, 700, 710, 720, 730, 740, 750, 780 or 790 to about nucleotide 3661 of the nucleotide sequence of SEQ ID NO:84 (CKX5), or about nucleotide 43, 44, 45, 50, 60, 70, 80, 90, 100, 110, 120, 130 or 140 to about nucleotide 1605 of the nucleotide sequence of SEQ ID NO:91 (CKX5); and/or (f) about nucleotide 1562, 1563, 1564, 1565, 1570, 1580, 1590, 1600, 1620, 1640, 1660, 1680, or 1700 to about nucleotide 8277 of the nucleotide sequence of SEQ ID NO:87 (CKX6) or about nucleotide 31, 32, 33, 34, 35, 40, 50, 60, 70, 80, 90, 100, 110, 120, 130, 140, 150, 160 or 170 to about nucleotide 1494 (CKX6) of the nucleotide sequence of SEQ ID NO:88 (CKX6).

[0208] In some embodiments, the method of editing produces a non-natural mutation that is a null allele and/or a dominant negative mutation.

[0209] In some embodiments, a method for making a plant is provided, the method comprising: (a) contacting a population of plant cells comprising at least one endogenous Cytokinin Oxidase/Dehydrogenase (CKX) gene with a nuclease targeted to the endogenous CKX gene, wherein the nuclease is linked to a nucleic acid binding domain (e.g., an editing system) that binds to a target site in the at least one endogenous CKX gene, wherein the at least one endogenous CKX gene: (i) comprises a sequence having at least 80% sequence identity to any one of the nucleotide sequences of SEQ ID NOs:72, 73, 75, 76, 78, 79, 81, 82, 84, 87, 88, or 91; (ii) comprises a region having at least 80% sequence identity to any one of the nucleotide sequences of SEQ ID NOs:93-98; and/or (iii) encodes a polypeptide having at least 80% identity to any one of the amino acid sequences of SEQ ID NOs: 74, 77, 80, 83, 89, or 92; (b) selecting from the population a plant cell that comprises a mutation in the at least one endogenous CKX gene, wherein the mutation is a substitution and/or a deletion; and (c) growing the selected plant cell into a plant comprising the mutation in the at least one endogenous CKX gene. In some embodiments, the deletion results in a null allele of the endogenous CKX gene; and growing the selected plant cell provides a plant comprising the null allele of the endogenous CKX gene.

[0210] In some embodiments, a method for improving yield traits in a plant or part thereof is provided, the method comprising (a) contacting a plant cell comprising an endogenous Cytokinin Oxidase/Dehydrogenase (CKX) gene with a nuclease targeting the endogenous CKX gene, wherein the nuclease is linked to a nucleic acid binding domain that binds to a target site in the endogenous CKX gene, wherein the endogenous CKX gene: (i) comprises a sequence having at least 80% sequence identity to any one of the nucleotide sequences of SEQ ID NOs:72, 73, 75, 76, 78, 79, 81, 82, 84, 87, 88, or 91; (ii) comprises a region having at least 80% sequence identity to any one of the nucleotide sequences of SEQ ID NOs:93-98; and/or (iii) encodes a polypeptide having at least 80% identity to any one of the amino acid sequences of SEQ ID NOs: 74, 77, 80, 83, 89, or 92; and (b) growing the plant cell into a plant comprising the mutation in the endogenous CKX gene, thereby improving yield traits (e.g., increased seed number, increased seed size; increased pod number; or increased yield or improved yield traits as a result of being able to increase planting density) in the plant or part thereof.

[0211] In some embodiments, a method for producing a plant or part thereof comprising at least one cell (e.g., one or more cells) having a mutation in an endogenous Cytokinin Oxidase/Dehydrogenase (CKX) gene, the method comprising contacting a target site in the endogenous CKX gene in the plant or plant part with a nuclease comprising a cleavage domain and a nucleic acid binding domain, wherein the nucleic acid binding domain of the nuclease binds to a target site in the endogenous CKX gene, the endogenous CKX gene: (a) comprising a sequence having at least 80% sequence identity to any one of the nucleotide sequences of SEQ ID NOs:72, 73, 75, 76, 78, 79, 81, 82, 84, 87, 88, or 91; (b) comprising a region having at least 80% sequence identity to any one of the nucleotide sequences of SEQ ID NOs:93-98; and/or (c) encoding a polypeptide having at least 80% identity to any one of the amino acid sequences of SEQ ID NOs: 74, 77, 80, 83, 89, or 92, thereby producing the plant or part thereof comprising at least one cell having a mutation in the endogenous CKX gene.

[0212] In some embodiments, a method of producing a plant or part thereof comprising a mutation in an endogenous Cytokinin Oxidase/Dehydrogenase (CKX) gene and improved yield traits, the method comprising contacting a target site in an endogenous CKX gene in the plant or plant part with a nuclease comprising a cleavage domain and a nucleic acid binding domain, wherein the nucleic acid binding domain binds to a target site in the endogenous CKX gene, the endogenous CKX gene: (a) comprising a sequence having at least 80% sequence identity to any one of the nucleotide sequences of SEQ ID NOs:72, 73, 75, 76, 78, 79, 81, 82, 84, 87, 88, or 91; (b) comprising a region having at least 80% sequence identity to any one of the nucleotide sequences of SEQ ID NOs:93-98; and/or (c) encoding a polypeptide having at least 80% identity to any one of the amino acid sequences of SEQ ID NOs: 74, 77, 80, 83, 89, or 92, thereby producing the plant or part thereof comprising a mutation in the endogenous CKX gene and exhibiting improved yield traits.

[0213] In some embodiments, a nuclease contacting a plant cell, a population of plant cells and/or a target site cleaves an endogenous CKX gene, thereby introducing a mutation into the endogenous CKX gene. A nuclease useful with the invention may be any nuclease that can be utilized to edit/modify a target nucleic acid. Such nucleases include, but are not limited to, a zinc finger nuclease, transcription activator-like effector nucleases (TALEN), endonuclease (e.g., Fok1) and/or a CRISPR-Cas effector protein. Likewise, a nucleic acid binding domain useful with the invention may be any DNA binding domain or RNA binding domain that can be utilized to edit/modify a target nucleic acid. Such nucleic acid binding domains include, but are not limited to, a zinc finger, transcription activator-like DNA binding domain (TAL), an argonaute and/or a CRISPR-Cas effector DNA binding domain.

[0214] In some embodiments, a method of editing an endogenous CKX gene in a plant or plant part is provided, the method comprising contacting a target site in CKX gene in the plant or plant part with a cytosine base editing system comprising a cytosine deaminase and a nucleic acid binding domain that binds to a target site in the CKX gene, wherein the CKX gene comprises a sequence having at least 80% sequence identity to any one of the nucleotide sequences of SEQ ID NOs:72, 73, 75, 76, 78, 79, 81, 82, 84, 87, 88, or 91, comprises a region having at least 80% sequence identity to any one of the nucleotide sequences of SEQ ID NOs:93-98 and/or encodes a polypeptide having at least 80% identity to any one of the amino acid sequences of SEQ ID NOs: 74, 77, 80, 83, 89, or 92, thereby producing the plant or part thereof comprising an endogenous CKX gene having a mutation resulting from the contact with the cytosine base editing system, and optionally wherein the plant exhibits improved yield traits.

[0215] In some embodiments, a method of editing an endogenous CKX gene in a plant or plant part is provided, the method comprising contacting a target site in CKX gene in the plant or plant part with an adenosine base editing system comprising an adenosine deaminase and a nucleic acid binding domain that binds to a target site in the CKX gene, wherein the CKX gene comprises a sequence having at least 80% sequence identity to any one of the nucleotide sequences of SEQ ID NOs:72, 73, 75, 76, 78, 79, 81, 82, 84, 87, 88, or 91, comprises a region having at least 80% sequence identity to any one of the nucleotide sequences of SEQ ID NOs:93-98 and/or encodes a polypeptide having at least 80% identity to any one of the amino acid sequences of SEQ ID NOs: 74, 77, 80, 83, 89, or 92, thereby producing the plant or part thereof comprising an endogenous CKX gene having a mutation resulting from the contact with the adenosine base editing system, and optionally wherein the plant exhibits improved yield traits.

[0216] In some embodiments, a method of detecting a mutant CKX gene (a mutation in an endogenous CKX gene) is provided, the method comprising detecting in the genome of a plant a mutation in an endogenous CKX nucleic acid that encodes an amino acid sequence of, for example, SEQ ID NOs: 74, 77, 80, 83, 89, or 92, which mutation results in a substitution in an amino acid residue of the encoded polypeptide sequence or a deletion of a portion (e.g., at least one residue or 2, 3, 4, 5, 6, 7, 8, 9, 10, 20, 30, 40, 50, 60, 70, 80, 90, 100, 200, 300, 400, or 500 or more consecutive residues) of the encoded polypeptide sequence.

[0217] In some embodiments, a method of detecting a mutant CKX gene (a mutation in an endogenous CKX gene) is provided, the method comprising detecting in the genome of a plant a mutation in any one of the nucleotide sequences of, for example, SEQ ID NOs: 72, 73, 75, 76, 78, 79, 81, 82, 84, 87, 88, or 91, optionally wherein the mutation is an insertion, a deletion or substation) of at least one nucleotide (e.g., a deletion of at least 1, 2, 3, 4, 5, 6, 7, 8, 9 10, 20, 30, 40, 50, 60, 70, 80, 90, 100, 200, 300, 400, 500, 1000, 1500, 2000, 2500, 3000, 4000, 5000, or 6000 or more consecutive bases).

[0218] In some embodiments, the present invention provides a method of detecting a mutation in an endogenous CKX gene, comprising detecting in the genome of a plant a mutated CKX gene produced as described herein.

[0219] In some embodiments, the present invention provides a method of producing a plant comprising a mutation in an endogenous CKX gene and at least one (e.g., one or more) polynucleotide of interest, the method comprising crossing a plant of the invention comprising at least one mutation (e.g., one or more mutations) in an endogenous CKX gene (a first plant) with a second plant that comprises the at least one polynucleotide of interest to produce progeny plants; and selecting progeny plants comprising at least one mutation in the CKX gene and the at least one polynucleotide of interest, thereby producing the plant comprising a mutation in an endogenous CKX gene and at least one polynucleotide of interest.

[0220] Further provided is a method of producing a plant comprising a mutation in an endogenous CKX gene and at least one polynucleotide of interest, the method comprising introducing at least one polynucleotide of interest into a plant of the present invention comprising at least one mutation (e.g., one or more mutations) in a CKX gene, thereby producing a plant comprising at least one mutation in a CKX gene and at least one polynucleotide of interest.

[0221] A polynucleotide of interest may be any polynucleotide that can confer a desirable phenotype or otherwise modify the phenotype or genotype of a plant. In some embodiments, a polynucleotide of interest may be polynucleotide that confers herbicide tolerance, insect resistance, disease resistance, improved yield traits, increased nutrient use efficiency and/or abiotic stress resistance.

[0222] A CKX gene useful with this invention includes any CKX gene that produces a polypeptide that is capable of regulating the cytokinin balance between active cytokinins and in active cytokinins in a plant or part thereof (optionally increasing the active cytokinins over the inactive cytokinins) and in which a mutation as described herein can confer improved yield traits in a plant or part thereof comprising the mutation. In some embodiments, the CKX gene is a CKX1 gene, a CKX2 gene, a CKX3 gene, a CKX4 gene, a CKX5 gene, and/or a CKX6 gene. In some embodiments, at least one non-natural mutation (e.g., one or more non-natural mutations) comprises a mutation in two or more CKX genes (e.g., 2, 3, 4, 5, or 6 CKX genes), e.g., a mutation in two or more of a CKX1 gene, a CKX2 gene, a CKX3 gene, a CKX4 gene, a CKX5 gene, and/or a CKX6 gene, in any combination.

[0223] In some embodiments, the mutation in an endogenous CKX gene may be a non-natural mutation. In some embodiments, at least one non-natural mutation (e.g., one or more non-natural mutations) can be a mutation in at least three (e.g., three or more, e.g., 3, 4, 5, or 6) of the endogenous CKX genes of CKX1, CKX2, CKX3, CKX4, CKX5 and/or CKX6 gene, in any combination. In some embodiments, a plant or plant part thereof comprising at least one non-natural mutation in at least one endogenous CKX gene (e.g., one or more endogenous CKX genes) encoding a CKX protein comprises a mutation (a) in an endogenous CKX1 gene, an endogenous CKX2 gene, and an endogenous CKX3 gene; (b) in an endogenous CKX1 gene, an endogenous CKX3, an endogenous CKX5 gene, and an endogenous CKX6 gene; or (c) in an endogenous CKX1 gene, an endogenous CKX2 gene, an endogenous CKX3 gene, and an endogenous CKX4 gene. In some embodiments, a plant comprising at least one non-natural mutation in at least one endogenous CKX gene encoding a CKX protein exhibits improved yield traits compared to an isogenic plant that does not comprise the mutation.

[0224] In some embodiments, the non-natural mutation may be any mutation in an endogenous CKX gene that results in improved yield traits when comprised in a plant. In some embodiments, the at least one non-natural mutation in an endogenous CKX gene (e.g., one or more endogenous CKX genes) can be a point mutation, optionally a base substitution, a base insertion and/or a base deletion. In some embodiments, the at least one non-natural mutation in an endogenous CKX gene is a null mutation and/or a dominant negative mutation. In some embodiments, the at least one non-natural mutation in an endogenous CKX gene in a plant may be a substitution, a deletion and/or an insertion that results in a plant exhibiting improved yield traits. In some embodiments, the at least one non-natural mutation in an endogenous CKX gene in a plant may be a substitution, a deletion and/or an insertion that results in a dominant negative mutation or a null mutation and a plant having improved yield traits. In some embodiments, the at least one non-natural mutation may be a base substitution to an A, a T, a G, or a C. In some embodiments, the at least one non-natural mutation may be a deletion of a portion or the entire CKX gene or CKX protein (e.g., a CKX1, CKX2, CKX3, CKX4, CKX5 or CKX6 gene or polypeptide).

[0225] In some embodiments, the present invention provides a guide nucleic acid (e.g., gRNA, gDNA, crRNA, crDNA) that binds to a target site in a Cytokinin Oxidase/Dehydrogenase (CKX) gene, the CKX gene: (a) comprising a sequence having at least 80% sequence identity to any one of the nucleotide sequences of SEQ ID NOs:72, 73, 75, 76, 78, 79, 81, 82, 84, 87, 88, or 91; (b) comprising a region having at least 80% sequence identity to any one of the nucleotide sequences of SEQ ID NOs:93-98; and/or (c) encoding a polypeptide having at least 80% identity to any one of the amino acid sequences of SEQ ID NOs: 74, 77, 80, 83, 89, or 92.

[0226] Example spacer sequences useful with a guide of this invention may comprise complementarity to a fragment or portion of a nucleotide sequence having at least 80% sequence identity to any one of the nucleotide sequences of SEQ ID NOs:72, 73, 75, 76, 78, 79, 81, 82, 84, 87, 88, or 91; or a fragment or portion of a nucleotide sequence encoding a polypeptide comprising a sequence having at least 80% sequence identity to any one of the amino acid sequences SEQ ID NOs:93-98.

[0227] In some embodiments, a target nucleic acid is an endogenous CKX gene that is capable of regulating the cytokinin balance between active cytokinins and in active cytokinins in a plant, optionally increasing the active cytokinins over the inactive cytokinins. In some embodiments, a target site in a target nucleic acid may comprise a sequence having at least 80% sequence identity to a region, portion or fragment of SEQ ID NOs:72, 73, 75, 76, 78, 79, 81, 82, 84, 87, 88, 91 or 93-98, or a target site in a target nucleic acid may encode a region of an amino acid sequence having at least 80% sequence identity to SEQ ID NOs:74, 77, 80, 83, 89, or 92.

[0228] In some embodiments, a guide nucleic acid comprises a spacer having the nucleotide sequence of any one of SEQ ID NOs:99-113. In some embodiments, a CKX polypeptide may be a CKX1, CKX2, CKX3, CKX4, CKX5 and/or a CKX6 polypeptide.

[0229] In some embodiments, a system is provided that comprises a guide nucleic acid of the present invention and a CRISPR-Cas effector protein that associates with the guide nucleic acid. In some embodiments, the system may further comprise a tracr nucleic acid that associates with the guide nucleic acid and a CRISPR-Cas effector protein, optionally wherein the tracr nucleic acid and the guide nucleic acid are covalently linked.

[0230] As used herein, “a CRISPR-Cas effector protein in association with a guide nucleic acid” refers to the complex that is formed between a CRISPR-Cas effector protein and a guide nucleic acid in order to direct the CRISPR-Cas effector protein to a target site in a gene.

[0231] In some embodiments, a gene editing system is provided, the gene editing system comprising a CRISPR-Cas effector protein in association with a guide nucleic acid, wherein the guide nucleic acid comprises a spacer sequence that binds to a CKX gene. In some embodiments, a CKX gene useful with the gene editing system (a) comprises a sequence having at least 80% sequence identity to any one of the nucleotide sequences of SEQ ID NOs:72, 73, 75, 76, 78, 79, 81, 82, 84, 87, 88, or 91; (b) comprises a region having at least 80% sequence identity to any one of the nucleotide sequences of SEQ ID NOs:93-98; and/or (c) encodes a polypeptide having at least 80% sequence identity to any one of the amino acid sequences of SEQ ID NOs:74, 77, 80, 83, 89, or 92. In some embodiments, a CKX polypeptide may be a CKX1, CKX2, CKX3, CKX4, CKX5 and/or a CKX6 polypeptide.

[0232] In some embodiments, the guide nucleic acid of a gene editing system can comprise a spacer sequence that has complementarity to a region, portion or fragment of a nucleotide sequence having at least 80% sequence identity to any one of the nucleotide sequences of SEQ ID NOs:72, 73, 75, 76, 78, 79, 81, 82, 84, 87, 88, 91 or 93-98, or may encode a region, portion or fragment of an amino acid sequence having at least 80% sequence identity to SEQ ID NOs:74, 77, 80, 83, 89, or 92. In some embodiments, a gene editing system may further comprise a tracr nucleic acid that associates with the guide nucleic acid and a CRISPR-Cas effector protein, optionally wherein the tracr nucleic acid and the guide nucleic acid are covalently linked.

[0233] In some embodiments, a guide nucleic acid is provided that binds to a target nucleic acid in an endogenous Cytokinin Oxidase/Dehydrogenase (CKX) gene having the gene identification number (gene ID) of Glyma15g18560, Glyma09g07360, Glyma17g06220, Glyma04g03130, Glyma09g35950 and/or Glyma09g07190.

[0234] The present invention further provides a complex comprising a CRISPR-Cas effector protein comprising a cleavage domain and a guide nucleic acid, wherein the guide nucleic acid binds to a target site in an endogenous Cytokinin Oxidase/Dehydrogenase (CKX) gene, wherein the CKX gene (a) comprises a sequence having at least 80% sequence identity to any one of the nucleotide sequences of SEQ ID NOs:72, 73, 75, 76, 78, 79, 81, 82, 84, 87, 88, or 91; (b) comprises a region having at least 80% sequence identity to any one of the nucleotide sequences of SEQ ID NOs:93-98; and/or (c) encodes a polypeptide having at least 80% sequence identity to any one of the amino acid sequences of SEQ ID NOs:74, 77, 80, 83, 89, or 92, wherein the cleavage domain cleaves a target strand in the CKX gene. In some embodiments, a CKX gene may be a CKX1, CKX2, CKX3, CKX4, CKX5 and/or a CKX6 gene.

[0235] Also provided herein are expression cassettes comprising (a) a polynucleotide encoding CRISPR-Cas effector protein comprising a cleavage domain and (b) a guide nucleic acid that binds to a target site in an endogenous Cytokinin Oxidase/Dehydrogenase (CKX) gene, wherein the guide nucleic acid comprises a spacer sequence that is complementary to and binds to a portion of the endogenous CKX gene, the endogenous CKX gene having at least 80% sequence identity to any one of the nucleotide sequences of SEQ ID NOs:72, 73, 75, 76, 78, 79, 81, 82, 84, 87, 88, or 91 or encoding a sequence having at least 80% sequence identity to any one of the amino acid sequences of SEQ ID NOs:74, 77, 80, 83, 89, or 92, optionally wherein the spacer sequence is complementary to and binds to a portion of the endogenous CKX gene having at least 80% sequence identity to any one of the nucleotide sequences of SEQ ID NOs:93-98. In some embodiments, a CKX gene may be a CKX1, CKX2, CKX3, CKX4, CKX5 and/or a CKX6 gene.

[0236] An editing system useful with this invention can be any site-specific (sequence-specific) genome editing system now known or later developed, which system can introduce mutations in target specific manner. For example, an editing system (e.g., site- or sequence-specific editing system) can include, but is not limited to, a CRISPR-Cas editing system, a meganuclease editing system, a zinc finger nuclease (ZFN) editing system, a transcription activator-like effector nuclease (TALEN) editing system, a base editing system and/or a prime editing system, each of which can comprise one or more polypeptides and/or one or more polynucleotides that when expressed as a system in a cell can modify (mutate) a target nucleic acid in a sequence specific manner. In some embodiments, an editing system (e.g., site- or sequence-specific editing system) can comprise one or more polynucleotides and/or one or more polypeptides, including but not limited to a nucleic acid binding domain (DNA binding domain), a nuclease, and/or other polypeptide, and/or a polynucleotide, and/or a guide nucleic acid (comprising a spacer having substantial complementarity or full complementarity to a target site).

[0237] In some embodiments, an editing system can comprise one or more sequence-specific nucleic acid binding domains (DNA binding domains) that can be from, for example, a polynucleotide-guided endonuclease, a CRISPR-Cas endonuclease (e.g., CRISPR-Cas effector protein), a zinc finger nuclease, a transcription activator-like effector nuclease (TALEN) and/or an Argonaute protein. In some embodiments, an editing system can comprise one or more cleavage domains (e.g., nucleases) including, but not limited to, an endonuclease (e.g., Fok1), a polynucleotide-guided endonuclease, a CRISPR-Cas endonuclease (e.g., CRISPR-Cas effector protein), a zinc finger nuclease, and/or a transcription activator-like effector nuclease (TALEN). In some embodiments, an editing system can comprise one or more polypeptides that include, but are not limited to, a deaminase (e.g., a cytosine deaminase, an adenine deaminase), a reverse transcriptase, a Dna2 polypeptide, and/or a 5′ flap endonuclease (FEN). In some embodiments, an editing system can comprise one or more polynucleotides, including, but is not limited to, a CRISPR array (CRISPR guide) nucleic acid, extended guide nucleic acid, and/or a reverse transcriptase template.

[0238] In some embodiments, a method of modifying or editing a CKX polypeptide may comprise contacting a target nucleic acid (e.g., a nucleic acid encoding a CKX polypeptide) with a base-editing fusion protein (e.g., a sequence specific DNA binding protein (e.g., a CRISPR-Cas effector protein or domain) fused to a deaminase domain (e.g., an adenine deaminase and/or a cytosine deaminase) and a guide nucleic acid, wherein the guide nucleic acid is capable of guiding/targeting the base editing fusion protein to the target nucleic acid, thereby editing a locus within the target nucleic acid. In some embodiments, a base editing fusion protein and guide nucleic acid may be comprised in one or more expression cassettes. In some embodiments, the target nucleic acid may be contacted with a base editing fusion protein and an expression cassette comprising a guide nucleic acid. In some embodiments, the sequence-specific DNA binding fusion proteins and guides may be provided as ribonucleoproteins (RNPs). In some embodiments, a cell may be contacted with more than one base-editing fusion protein and/or one or more guide nucleic acids that may target one or more target nucleic acids in the cell.

[0239] In some embodiments, a method of modifying or editing a CKX gene may comprise contacting a target nucleic acid (e.g., a nucleic acid encoding a CKX polypeptide) with a sequence-specific DNA binding fusion protein (e.g., a sequence-specific DNA binding protein (e.g., a CRISPR-Cas effector protein or domain) fused to a peptide tag, a deaminase fusion protein comprising a deaminase domain (e.g., an adenine deaminase and/or a cytosine deaminase) fused to an affinity polypeptide that is capable of binding to the peptide tag, and a guide nucleic acid, wherein the guide nucleic acid is capable of guiding/targeting the sequence-specific DNA binding fusion protein to the target nucleic acid and the sequence-specific DNA binding fusion protein is capable of recruiting the deaminase fusion protein to the target nucleic acid via the peptide tag-affinity polypeptide interaction, thereby editing a locus within the target nucleic acid. In some embodiments, the sequence-specific DNA binding fusion protein may be fused to the affinity polypeptide that binds the peptide tag and the deaminase may be fuse to the peptide tag, thereby recruiting the deaminase to the sequence-specific DNA binding fusion protein and to the target nucleic acid. In some embodiments, the sequence-specific binding fusion protein, deaminase fusion protein, and guide nucleic acid may be comprised in one or more expression cassettes. In some embodiments, the target nucleic acid may be contacted with a sequence-specific binding fusion protein, deaminase fusion protein, and an expression cassette comprising a guide nucleic acid. In some embodiments, the sequence-specific DNA binding fusion proteins, deaminase fusion proteins and guides may be provided as ribonucleoproteins (RNPs).

[0240] In some embodiments, methods such as prime editing may be used to generate a mutation in an endogenous CKX gene. In prime editing, RNA-dependent DNA polymerase (reverse transcriptase, RT) and reverse transcriptase templates (RT template) are used in combination with sequence specific nucleic acid binding domains that confer the ability to recognize and bind the target in a sequence-specific manner, and which can also cause a nick of the PAM-containing strand within the target. The sequence specific nucleic acid binding domain may be a CRISPR-Cas effector protein and in this case, the CRISPR array or guide RNA may be an extended guide that comprises an extended portion comprising a primer binding site (PSB) and the edit to be incorporated into the genome (the template). Similar to base editing, prime editing can take advantageous of the various methods of recruiting proteins for use in the editing to the target site, such methods including both non-covalent and covalent interactions between the proteins and nucleic acids used in the selected process of genome editing.

[0241] In some embodiments, the mutation or modification of a CKX gene may be an insertion, a deletion and/or a point mutation in that produces a CKX polypeptide having, for example, a C-terminal truncation (e.g., a mutated CKX polypeptide) or the mutation of a CKX gene may result in no CKX polypeptide. In some embodiments, a plant comprising an endogenous CKX gene having a mutation as described herein (e.g., at least one mutation (e.g., one or more mutations) in an endogenous CKX gene, optionally wherein no CKX polypeptide is produced or the CKX polypeptide that is produced is truncated) may comprise improved yield traits compared to a control plant that does not comprise the at least one non-natural mutation in an endogenous CKX gene.

[0242] In some embodiments, a plant part may be a cell. In some embodiments, the plant or plant part thereof may be any plant or part thereof as described herein. In some embodiments, a plant useful with this invention may be corn, soybean, canola, wheat, rice, cotton, sugarcane, sugar beet, barley, oats, alfalfa, sunflower, safflower, oil palm. sesame, coconut, tobacco, potato, sweet potato, cassava, coffee, apple, plum, apricot, peach, cherry, pear, fig, banana, citrus, cocoa, avocado, olive, almond, walnut, strawberry, watermelon, pepper, grape, tomato, cucumber, or a Brassica spp. In some embodiments, the plant may be a soybean plant and the plant part, including a cell, may be from a soybean plant.

[0243] In some embodiments, a mutation that is introduced into an endogenous CKX gene polypeptide is a non-natural mutation. In some embodiments, a mutation that is introduced into an endogenous CKX gene may be a substitution, an insertion and/or a deletion of one or more nucleotides as described herein. In some embodiments, a mutation that is introduced into an endogenous CKX gene may be a deletion, optionally a deletion of all or a portion of the CKX gene, e.g., a 3′ truncation of the gene resulting in a CKX polypeptide with a C-terminal truncation or no CKX polypeptide. In some embodiments, a mutation in an endogenous CKX gene may result in altered expression (e.g., increased or decreased expression) of the gene as compared to a CKX gene, and therefore an altered amount of the CKX polypeptide compared to the corresponding CKX gene (e.g., the CKX gene not modified as described herein). In some embodiments, a mutation in the promoter (e.g., promoter bashing) of an endogenous CKX gene may result in modified (increased/decreased) expression of the CKX gene, and therefore an increased amount of the CKX polypeptide. In some embodiments, a mutation in an endogenous CKX gene may result in reduced expression of the gene as compared to a CKX gene, and therefore a reduced amount of the CKX polypeptide that is a null or inactive polypeptide. In some embodiments, a mutated CKX gene as described herein may have the same expression level as the CKX gene, but the mutated CKX gene produces a null or inactive CKX polypeptide.

[0244] In some embodiments, a CKX gene may be a CKX1 gene, CKX2 gene, CKX3 gene, CKX4 gene, CKX5 gene or CKX6 gene. In some embodiments, a CKX polypeptide may be a CKX1 polypeptide, CKX2 polypeptide, CKX3 polypeptide, CKX4 polypeptide, CKX5 polypeptide or CKX6 polypeptide. In some embodiments, a plant or part thereof may comprise a mutation in two or more endogenous CKX genes. For example, a plant or part thereof may comprise a non-natural mutation in (a) in a CKX1 gene, a CKX2 gene, and a CKX3 gene; (b) in a CKX1 gene, a CKX3, a CKX5 gene, and a CKX6 gene; or (c) in a CKX1 gene, a CKX2 gene, a CKX3 gene, and a CKX4 gene. Further combinations of the CKX genes comprising non-natural mutations as described herein are contemplated to be useful for producing a plant exhibiting improvements in yield components.

[0245] In some embodiments, a sequence-specific nucleic acid binding domain (DNA binding domains) of an editing system useful with this invention can be from, for example, a polynucleotide-guided endonuclease, a CRISPR-Cas endonuclease (e.g., CRISPR-Cas effector protein), a zinc finger nuclease, a transcription activator-like effector nuclease (TALEN) and/or an Argonaute protein.

[0246] In some embodiments, a sequence-specific nucleic acid binding domain may be a CRISPR-Cas effector protein, optionally wherein the CRISPR-Cas effector protein may be from a Type I CRISPR-Cas system, a Type II CRISPR-Cas system, a Type III CRISPR-Cas system, a Type IV CRISPR-Cas system, Type V CRISPR-Cas system, or a Type VI CRISPR-Cas system. In some embodiments, a CRISPR-Cas effector protein of the invention may be from a Type II CRISPR-Cas system or a Type V CRISPR-Cas system. In some embodiments, a CRISPR-Cas effector protein may be Type II CRISPR-Cas effector protein, for example, a Cas9 effector protein. In some embodiments, a CRISPR-Cas effector protein may be Type V CRISPR-Cas effector protein, for example, a Cas12 effector protein.

[0247] As used herein, a “CRISPR-Cas effector protein” is a protein or polypeptide or domain thereof that cleaves or cuts a nucleic acid, binds a nucleic acid (e.g., a target nucleic acid and/or a guide nucleic acid), and/or that identifies, recognizes, or binds a guide nucleic acid as defined herein. In some embodiments, a CRISPR-Cas effector protein may be an enzyme (e.g., a nuclease, endonuclease, nickase, etc.) or portion thereof and/or may function as an enzyme. In some embodiments, a CRISPR-Cas effector protein refers to a CRISPR-Cas nuclease polypeptide or domain thereof that comprises nuclease activity or in which the nuclease activity has been reduced or eliminated, and/or comprises nickase activity or in which the nickase has been reduced or eliminated, and/or comprises single stranded DNA cleavage activity (ss DNAse activity) or in which the ss DNAse activity has been reduced or eliminated, and/or comprises self-processing RNAse activity or in which the self-processing RNAse activity has been reduced or eliminated. A CRISPR-Cas effector protein may bind to a target nucleic acid.

[0248] In some embodiments, a CRISPR-Cas effector protein may include, but is not limited to, a Cas9, C2c1, C2c3, Cas12a (also referred to as Cpf1), Cas12b, Cas12c, Cas12d, Cas12e, Cas13a, Cas13b, Cas13c, Cas13d, Cas1, Cas1B, Cas2, Cas3, Cas3′, Cas3″, Cas4, Cas5, Cas6, Cas7, Cas8, Cas9 (also known as Csn1 and Csx12), Cas10, Csy1, Csy2, Csy3, Cse1, Cse2, Csc1, Csc2, Csa5, Csn2, Csm2, Csm3, Csm4, Csm5, Csm6, Cmr1, Cmr3, Cmr4, Cmr5, Cmr6, Csb1, Csb2, Csb3, Csx17, Csx14, Csx10, Csx16, CsaX, Csx3, Csx1, Csx15, Csf1, Csf2, Csf3, Csf4 (dinG), and/or Csf5 nuclease, optionally wherein the CRISPR-Cas effector protein may be a Cas9, Cas12a (Cpf1), Cas12b, Cas12c (C2c3), Cas12d (CasY), Cas12e (CasX), Cas12g, Cas12h, Cas12i, C2c4, C2c5, C2c8, C2c9, C2c10, Cas14a, Cas14b, and/or Cas14c effector protein.

[0249] In some embodiments, a CRISPR-Cas effector protein useful with the invention may comprise a mutation in its nuclease active site (e.g., RuvC, HNH, e.g., RuvC site of a Cas12a nuclease domain; e.g., RuvC site and/or HNH site of a Cas9 nuclease domain). A CRISPR-Cas effector protein having a mutation in its nuclease active site, and therefore, no longer comprising nuclease activity, is commonly referred to as “dead,” e.g., dCas. In some embodiments, a CRISPR-Cas effector protein domain or polypeptide having a mutation in its nuclease active site may have impaired activity or reduced activity as compared to the same CRISPR-Cas effector protein without the mutation, e.g., a nickase, e.g, Cas9 nickase, Cas12a nickase.

[0250] A CRISPR Cas9 effector protein or CRISPR Cas9 effector domain useful with this invention may be any known or later identified Cas9 nuclease. In some embodiments, a CRISPR Cas9 polypeptide can be a Cas9 polypeptide from, for example, Streptococcus spp. (e.g., S. pyogenes, S. thermophiles), Lactobacillus spp., Bifidobacterium spp., Kandleria spp., Leuconostoc spp., Oenococcus spp., Pediococcus spp., Weissella spp., and/or Olsenella spp. Example Cas9 sequences include, but are not limited to, the amino acid sequences of SEQ ID NOs:59-60 or the polynucleotide sequences of SEQ ID NOs:61-71.

[0251] In some embodiments, the CRISPR-Cas effector protein may be a Cas9 polypeptide derived from Streptococcus pyogenes and recognizes the PAM sequence motif NGG, NAG, NGA (Mali et al, Science 2013; 339(6121): 823-826). In some embodiments, the CRISPR-Cas effector protein may be a Cas9 polypeptide derived from Streptococcus thermophiles and recognizes the PAM sequence motif NGGNG and/or NNAGAAW (W=A or T) (See, e.g., Horvath et al, Science, 2010; 327(5962): 167-170, and Deveau et al, J Bacteriol 2008; 190(4): 1390-1400). In some embodiments, the CRISPR-Cas effector protein may be a Cas9 polypeptide derived from Streptococcus mutans and recognizes the PAM sequence motif NGG and/or NAAR (R=A or G) (See, e.g., Deveau et al, J BACTERIOL 2008; 190(4): 1390-1400). In some embodiments, the CRISPR-Cas effector protein may be a Cas9 polypeptide derived from Streptococcus aureus and recognizes the PAM sequence motif NNGRR (R=A or G). In some embodiments, the CRISPR-Cas effector protein may be a Cas9 protein derived from S. aureus, which recognizes the PAM sequence motif N GRRT (R=A or G). In some embodiments, the CRISPR-Cas effector protein may be a Cas9 polypeptide derived from S. aureus, which recognizes the PAM sequence motif N GRRV (R=A or G). In some embodiments, the CRISPR-Cas effector protein may be a Cas9 polypeptide that is derived from Neisseria meningitidis and recognizes the PAM sequence motif N GATT or N GCTT (R=A or G, V=A, G or C) (See, e.g., Hou et ah, PNAS 2013, 1-6). In the aforementioned embodiments, N can be any nucleotide residue, e.g., any of A, G, C or T. In some embodiments, the CRISPR-Cas effector protein may be a Cas13a protein derived from Leptotrichia shahii, which recognizes a protospacer flanking sequence (PFS) (or RNA PAM (rPAM)) sequence motif of a single 3′ A, U, or C, which may be located within the target nucleic acid.

[0252] In some embodiments, the CRISPR-Cas effector protein may be derived from Cas12a, which is a Type V Clustered Regularly Interspaced Short Palindromic Repeats (CRISPR)-Cas nuclease (see, e.g., SEQ ID NOs:1-20). Cas12a differs in several respects from the more well-known Type II CRISPR Cas9 nuclease. For example, Cas9 recognizes a G-rich protospacer-adjacent motif (PAM) that is 3′ to its guide RNA (gRNA, sgRNA, crRNA, crDNA, CRISPR array) binding site (protospacer, target nucleic acid, target DNA) (3′-NGG), while Cas12a recognizes a T-rich PAM that is located 5′ to the target nucleic acid (5′-TTN, 5′-TTTN. In fact, the orientations in which Cas9 and Cas12a bind their guide RNAs are very nearly reversed in relation to their N and C termini. Furthermore, Cas12a enzymes use a single guide RNA (gRNA, CRISPR array, crRNA) rather than the dual guide RNA (sgRNA (e.g., crRNA and tracrRNA)) found in natural Cas9 systems, and Cas12a processes its own gRNAs. Additionally, Cas12a nuclease activity produces staggered DNA double stranded breaks instead of blunt ends produced by Cas9 nuclease activity, and Cas12a relies on a single RuvC domain to cleave both DNA strands, whereas Cas9 utilizes an HNH domain and a RuvC domain for cleavage.

[0253] A CRISPR Cas12a effector protein/domain useful with this invention may be any known or later identified Cas12a polypeptide (previously known as Cpf1) (see, e.g., U.S. Pat. No. 9,790,490, which is incorporated by reference for its disclosures of Cpf1 (Cas12a) sequences). The term “Cas12a”, “Cas12a polypeptide” or “Cas12a domain” refers to an RNA-guided nuclease comprising a Cas12a polypeptide, or a fragment thereof, which comprises the guide nucleic acid binding domain of Cas12a and/or an active, inactive, or partially active DNA cleavage domain of Cas12a. In some embodiments, a Cas12a useful with the invention may comprise a mutation in the nuclease active site (e.g., RuvC site of the Cas12a domain). A Cas12a domain or Cas12a polypeptide having a mutation in its nuclease active site, and therefore, no longer comprising nuclease activity, is commonly referred to as deadCas12a (e.g., dCas12a). In some embodiments, a Cas12a domain or Cas12a polypeptide having a mutation in its nuclease active site may have impaired activity, e.g., may have nickase activity.

[0254] Any deaminase domain/polypeptide useful for base editing may be used with this invention. In some embodiments, the deaminase domain may be a cytosine deaminase domain or an adenine deaminase domain. A cytosine deaminase (or cytidine deaminase) useful with this invention may be any known or later identified cytosine deaminase from any organism (see, e.g., U.S. Pat. No. 10,167,457 and Thuronyi et al. Nat. Biotechnol. 37:1070-1079 (2019), each of which is incorporated by reference herein for its disclosure of cytosine deaminases). Cytosine deaminases can catalyze the hydrolytic deamination of cytidine or deoxycytidine to uridine or deoxyuridine, respectively. Thus, in some embodiments, a deaminase or deaminase domain useful with this invention may be a cytidine deaminase domain, catalyzing the hydrolytic deamination of cytosine to uracil. In some embodiments, a cytosine deaminase may be a variant of a naturally occurring cytosine deaminase, including but not limited to a primate (e.g., a human, monkey, chimpanzee, gorilla), a dog, a cow, a rat or a mouse. Thus, in some embodiments, an cytosine deaminase useful with the invention may be about 70% to about 100% identical to a wild type cytosine deaminase (e.g., about 70%, 71%, 72%, 73%, 74%, 75%, 76%, 77%, 78%, 79%, 80%, 81%, 82%, 83%, 84%, 85%, 86%, 87%, 88%, 89%, 90%, 91%, 92%, 93%, 94%, 95%, 96%, 97%, 98%, 99%, or 100% identical, and any range or value therein, to a naturally occurring cytosine deaminase).

[0255] In some embodiments, a cytosine deaminase useful with the invention may be an apolipoprotein B mRNA-editing complex (APOBEC) family deaminase. In some embodiments, the cytosine deaminase may be an APOBEC1 deaminase, an APOBEC2 deaminase, an APOBEC3A deaminase, an APOBEC3B deaminase, an APOBEC3C deaminase, an APOBEC3D deaminase, an APOBEC3F deaminase, an APOBEC3G deaminase, an APOBEC3H deaminase, an APOBEC4 deaminase, a human activation induced deaminase (hAID), an rAPOBEC1, FERNY, and/or a CDA1, optionally a pmCDA1, an atCDA1 (e.g., At2g19570), and evolved versions of the same (e.g., SEQ ID NO:27, SEQ ID NO:28 or SEQ ID NO:29). In some embodiments, the cytosine deaminase may be an APOBEC1 deaminase having the amino acid sequence of SEQ ID NO:23. In some embodiments, the cytosine deaminase may be an APOBEC3A deaminase having the amino acid sequence of SEQ ID NO:24. In some embodiments, the cytosine deaminase may be an CDA1 deaminase, optionally a CDA1 having the amino acid sequence of SEQ ID NO:25. In some embodiments, the cytosine deaminase may be a FERNY deaminase, optionally a FERNY having the amino acid sequence of SEQ ID NO:26. In some embodiments, a cytosine deaminase useful with the invention may be about 70% to about 100% identical (e.g., 70%, 71%, 72%, 73%, 74%, 75%, 76%, 77%, 78%, 79%, 80%, 81%, 82%, 83%, 84%, 85%, 86%, 87%, 88%, 89%, 90%, 91%, 92%, 93%, 94%, 95%, 96%, 97%, 98%, 99%, 99.5% or 100% identical) to the amino acid sequence of a naturally occurring cytosine deaminase (e.g., an evolved deaminase). In some embodiments, a cytosine deaminase useful with the invention may be about 70% to about 99.5% identical (e.g., about 70%, 71%, 72%, 73%, 74%, 75%, 76%, 77%, 78%, 79%, 80%, 81%, 82%, 83%, 84%, 85%, 86%, 87%, 88%, 89%, 90%, 91%, 92%, 93%, 94%, 95%, 96%, 97%, 98%, 99%, or 99.5% identical) to the amino acid sequence of SEQ ID NO:23, SEQ ID NO:24, SEQ ID NO:25 or SEQ ID NO:26 (e.g., at least 80%, at least 85%, at least 90%, at least 92%, at least 95%, at least 96%, at least 97%, at least 98%, at least 99%, or at least 99.5% identical to the amino acid sequence of SEQ ID NO:23, SEQ ID NO:24, SEQ ID NO:25, SEQ ID NO:26, SEQ ID NO:27, SEQ ID NO:28 or SEQ ID NO:29). In some embodiments, a polynucleotide encoding a cytosine deaminase may be codon optimized for expression in a plant and the codon optimized polypeptide may be about 70% to 99.5% identical to the reference polynucleotide.

[0256] In some embodiments, a nucleic acid construct of this invention may further encode an uracil glycosylase inhibitor (UGI) (e.g., uracil-DNA glycosylase inhibitor) polypeptide/domain. Thus, in some embodiments, a nucleic acid construct encoding a CRISPR-Cas effector protein and a cytosine deaminase domain (e.g., encoding a fusion protein comprising a CRISPR-Cas effector protein domain fused to a cytosine deaminase domain, and/or a CRISPR-Cas effector protein domain fused to a peptide tag or to an affinity polypeptide capable of binding a peptide tag and/or a deaminase protein domain fused to a peptide tag or to an affinity polypeptide capable of binding a peptide tag) may further encode a uracil-DNA glycosylase inhibitor (UGI), optionally wherein the UGI may be codon optimized for expression in a plant. In some embodiments, the invention provides fusion proteins comprising a CRISPR-Cas effector polypeptide, a deaminase domain, and a UGI and/or one or more polynucleotides encoding the same, optionally wherein the one or more polynucleotides may be codon optimized for expression in a plant. In some embodiments, the invention provides fusion proteins, wherein a CRISPR-Cas effector polypeptide, a deaminase domain, and a UGI may be fused to any combination of peptide tags and affinity polypeptides as described herein, thereby recruiting the deaminase domain and UGI to the CRISPR-Cas effector polypeptide and a target nucleic acid. In some embodiments, a guide nucleic acid may be linked to a recruiting RNA motif and one or more of the deaminase domain and/or UGI may be fused to an affinity polypeptide that is capable of interacting with the recruiting RNA motif, thereby recruiting the deaminase domain and UGI to a target nucleic acid.

[0257] A “uracil glycosylase inhibitor” useful with the invention may be any protein that is capable of inhibiting a uracil-DNA glycosylase base-excision repair enzyme. In some embodiments, a UGI domain comprises a wild type UGI or a fragment thereof. In some embodiments, a UGI domain useful with the invention may be about 70% to about 100% identical (e.g., 70%, 71%, 72%, 73%, 74%, 75%, 76%, 77%, 78%, 79%, 80%, 81%, 82%, 83%, 84%, 85%, 86%, 87%, 88%, 89%, 90%, 91%, 92%, 93%, 94%, 95%, 96%, 97%, 98%, 99%, 99.5% or 100% identical and any range or value therein) to the amino acid sequence of a naturally occurring UGI domain. In some embodiments, a UGI domain may comprise the amino acid sequence of SEQ ID NO:41 or a polypeptide having about 70% to about 99.5% sequence identity to the amino acid sequence of SEQ ID NO:41 (e.g., at least 80%, at least 85%, at least 90%, at least 92%, at least 95%, at least 96%, at least 97%, at least 98%, at least 99%, or at least 99.5% identical to the amino acid sequence of SEQ ID NO:41). For example, in some embodiments, a UGI domain may comprise a fragment of the amino acid sequence of SEQ ID NO:41 that is 100% identical to a portion of consecutive nucleotides (e.g., 10, 15, 20, 25, 30, 35, 40, 45, 50, 55, 60, 65, 70, 75, 80 consecutive nucleotides; e.g., about 10, 15, 20, 25, 30, 35, 40, 45, to about 50, 55, 60, 65, 70, 75, 80 consecutive nucleotides) of the amino acid sequence of SEQ ID NO:41. In some embodiments, a UGI domain may be a variant of a known UGI (e.g., SEQ ID NO:41) having about 70% to about 99.5% sequence identity (e.g., 70%, 71%, 72%, 73%, 74%, 75%, 76%, 77%, 78%, 79%, 80%, 81%, 82%, 83%, 84%, 85%, 86%, 87%, 88%, 89%, 90%, 91%, 92%, 93%, 94%, 95%, 96%, 97%, 98%, 99%, 99.5% sequence identity, and any range or value therein) to the known UGI. In some embodiments, a polynucleotide encoding a UGI may be codon optimized for expression in a plant (e.g., a plant) and the codon optimized polypeptide may be about 70% to about 99.5% identical to the reference polynucleotide.

[0258] An adenine deaminase (or adenosine deaminase) useful with this invention may be any known or later identified adenine deaminase from any organism (see, e.g., U.S. Pat. No. 10,113,163, which is incorporated by reference herein for its disclosure of adenine deaminases). An adenine deaminase can catalyze the hydrolytic deamination of adenine or adenosine. In some embodiments, the adenine deaminase may catalyze the hydrolytic deamination of adenosine or deoxyadenosine to inosine or deoxyinosine, respectively. In some embodiments, the adenosine deaminase may catalyze the hydrolytic deamination of adenine or adenosine in DNA. In some embodiments, an adenine deaminase encoded by a nucleic acid construct of the invention may generate an A→G conversion in the sense (e.g., “+”; template) strand of the target nucleic acid or a T→C conversion in the antisense (e.g., “−”, complementary) strand of the target nucleic acid.

[0259] In some embodiments, an adenosine deaminase may be a variant of a naturally occurring adenine deaminase. Thus, in some embodiments, an adenosine deaminase may be about 70% to 100% identical to a wild type adenine deaminase (e.g., about 70%, 71%, 72%, 73%, 74%, 75%, 76%, 77%, 78%, 79%, 80%, 81%, 82%, 83%, 84%, 85%, 86%, 87%, 88%, 89%, 90%, 91%, 92%, 93%, 94%, 95%, 96%, 97%, 98%, 99%, or 100% identical, and any range or value therein, to a naturally occurring adenine deaminase). In some embodiments, the deaminase or deaminase does not occur in nature and may be referred to as an engineered, mutated or evolved adenosine deaminase. Thus, for example, an engineered, mutated or evolved adenine deaminase polypeptide or an adenine deaminase domain may be about 70% to 99.9% identical to a naturally occurring adenine deaminase polypeptide/domain (e.g., about 70%, 71%, 72%, 73%, 74%, 75%, 76%, 77%, 78%, 79%, 80%, 81%, 82%, 83%, 84%, 85%, 86%, 87%, 88%, 89%, 90%, 91%, 92%, 93%, 94%, 95%, 96%, 97%, 98%, 99%, 99.1%, 99.2%, 99.3%, 99.4%, 99.5%, 99.6%, 99.7%, 99.8% or 99.9% identical, and any range or value therein, to a naturally occurring adenine deaminase polypeptide or adenine deaminase domain). In some embodiments, the adenosine deaminase may be from a bacterium, (e.g., Escherichia coli, Staphylococcus aureus, Haemophilus influenzae, Caulobacter crescentus, and the like). In some embodiments, a polynucleotide encoding an adenine deaminase polypeptide/domain may be codon optimized for expression in a plant.

[0260] In some embodiments, an adenine deaminase domain may be a wild type tRNA-specific adenosine deaminase domain, e.g., a tRNA-specific adenosine deaminase (TadA) and/or a mutated/evolved adenosine deaminase domain, e.g., mutated/evolved tRNA-specific adenosine deaminase domain (TadA*). In some embodiments, a TadA domain may be from E. coli. In some embodiments, the TadA may be modified, e.g., truncated, missing one or more N-terminal and/or C-terminal amino acids relative to a full-length TadA (e.g., 1, 2, 3, 4, 5, 6, 7, 8, 9, 10, 11, 12, 13, 14, 15, 6, 17, 18, 19, or 20 N-terminal and/or C terminal amino acid residues may be missing relative to a full length TadA. In some embodiments, a TadA polypeptide or TadA domain does not comprise an N-terminal methionine. In some embodiments, a wild type E. coli TadA comprises the amino acid sequence of SEQ ID NO:30. In some embodiments, a mutated/evolved E. coli TadA* comprises the amino acid sequence of SEQ ID NOs:31-40 (e.g., SEQ ID NOs:31, 32, 33, 34, 35, 36, 37, 38, 39 or 40). In some embodiments, a polynucleotide encoding a TadA/TadA* may be codon optimized for expression in a plant.

[0261] A cytosine deaminase catalyzes cytosine deamination and results in a thymidine (through a uracil intermediate), causing a C to T conversion, or a G to A conversion in the complementary strand in the genome. Thus, in some embodiments, the cytosine deaminase encoded by the polynucleotide of the invention generates a C→T conversion in the sense (e.g., “+”; template) strand of the target nucleic acid or a G→A conversion in antisense (e.g., “−”, complementary) strand of the target nucleic acid.

[0262] In some embodiments, the adenine deaminase encoded by the nucleic acid construct of the invention generates an A→G conversion in the sense (e.g., “+”; template) strand of the target nucleic acid or a T→C conversion in the antisense (e.g., “−”, complementary) strand of the target nucleic acid.

[0263] The nucleic acid constructs of the invention encoding a base editor comprising a sequence-specific DNA binding protein and a cytosine deaminase polypeptide, and nucleic acid constructs/expression cassettes/vectors encoding the same, may be used in combination with guide nucleic acids for modifying target nucleic acid including, but not limited to, generation of C→T or G→A mutations in a target nucleic acid including, but not limited to, a plasmid sequence; generation of C→T or G→A mutations in a coding sequence to alter an amino acid identity; generation of C→T or G→A mutations in a coding sequence to generate a stop codon; generation of C→T or G→A mutations in a coding sequence to disrupt a start codon; generation of point mutations in genomic DNA to generate a truncated CKX polypeptide.

[0264] The nucleic acid constructs of the invention encoding a base editor comprising a sequence-specific DNA binding protein and an adenine deaminase polypeptide, and expression cassettes and/or vectors encoding the same may be used in combination with guide nucleic acids for modifying a target nucleic acid including, but not limited to, generation of A→G or T→C mutations in a target nucleic acid including, but not limited to, a plasmid sequence; generation of A→G or T→C mutations in a coding sequence to alter an amino acid identity; generation of A→G or T→C mutations in a coding sequence to generate a stop codon; generation of A→G or T→C mutations in a coding sequence to disrupt a start codon; generation of point mutations in genomic DNA to disrupt function; and/or generation of point mutations in genomic DNA to disrupt splice junctions.

[0265] The nucleic acid constructs of the invention comprising a CRISPR-Cas effector protein or a fusion protein thereof may be used in combination with a guide RNA (gRNA, CRISPR array, CRISPR RNA, crRNA), designed to function with the encoded CRISPR-Cas effector protein or domain, to modify a target nucleic acid. A guide nucleic acid useful with this invention comprises at least one spacer sequence and at least one repeat sequence. The guide nucleic acid is capable of forming a complex with the CRISPR-Cas nuclease domain encoded and expressed by a nucleic acid construct of the invention and the spacer sequence is capable of hybridizing to a target nucleic acid, thereby guiding the complex (e.g., a CRISPR-Cas effector fusion protein (e.g., CRISPR-Cas effector domain fused to a deaminase domain and/or a CRISPR-Cas effector domain fused to a peptide tag or an affinity polypeptide to recruit a deaminase domain and optionally, a UGI) to the target nucleic acid, wherein the target nucleic acid may be modified (e.g., cleaved or edited) or modulated (e.g., modulating transcription) by the deaminase domain.

[0266] As an example, a nucleic acid construct encoding a Cas9 domain linked to a cytosine deaminase domain (e.g., fusion protein) may be used in combination with a Cas9 guide nucleic acid to modify a target nucleic acid, wherein the cytosine deaminase domain of the fusion protein deaminates a cytosine base in the target nucleic acid, thereby editing the target nucleic acid. In a further example, a nucleic acid construct encoding a Cas9 domain linked to an adenine deaminase domain (e.g., fusion protein) may be used in combination with a Cas9 guide nucleic acid to modify a target nucleic acid, wherein the adenine deaminase domain of the fusion protein deaminates an adenosine base in the target nucleic acid, thereby editing the target nucleic acid.

[0267] Likewise, a nucleic acid construct encoding a Cas12a domain (or other selected CRISPR-Cas nuclease, e.g., C2c1, C2c3, Cas12b, Cas12c, Cas12d, Cas12e, Cas13a, Cas13b, Cas13c, Cas13d, Cas1, Cas1B, Cas2, Cas3, Cas3′, Cas3″, Cas4, Cas5, Cas6, Cas7, Cas8, Cas9 (also known as Csn1 and Csx12), Cas10, Csy1, Csy2, Csy3, Cse1, Cse2, Csc1, Csc2, Csa5, Csn2, Csm2, Csm3, Csm4, Csm5, Csm6, Cmr1, Cmr3, Cmr4, Cmr5, Cmr6, Csb1, Csb2, Csb3, Csx17, Csx14, Csx10, Csx16, CsaX, Csx3, Csx1, Csx15, Csf1, Csf2, Csf3, Csf4 (dinG), and/or Csf5) linked to a cytosine deaminase domain or adenine deaminase domain (e.g., fusion protein) may be used in combination with a Cas12a guide nucleic acid (or the guide nucleic acid for the other selected CRISPR-Cas nuclease) to modify a target nucleic acid, wherein the cytosine deaminase domain or adenine deaminase domain of the fusion protein deaminates a cytosine base in the target nucleic acid, thereby editing the target nucleic acid.

[0268] A “guide nucleic acid,” “guide RNA,” “gRNA,” “CRISPR RNA/DNA” “crRNA” or “crDNA” as used herein means a nucleic acid that comprises at least one spacer sequence, which is complementary to (and hybridizes to) a target DNA (e.g., protospacer), and at least one repeat sequence (e.g., a repeat of a Type V Cas12a CRISPR-Cas system, or a fragment or portion thereof; a repeat of a Type II Cas9 CRISPR-Cas system, or fragment thereof; a repeat of a Type V C2c1 CRISPR Cas system, or a fragment thereof; a repeat of a CRISPR-Cas system of, for example, C2c3, Cas12a (also referred to as Cpf1), Cas12b, Cas12c, Cas12d, Cas12e, Cas13a, Cas13b, Cas13c, Cas13d, Cas1, Cas1B, Cas2, Cas3, Cas3′, Cas3″, Cas4, Cas5, Cas6, Cas7, Cas8, Cas9 (also known as Csn1 and Csx12), Cas10, Csy1, Csy2, Csy3, Cse1, Cse2, Csc1, Csc2, Csa5, Csn2, Csm2, Csm3, Csm4, Csm5, Csm6, Cmr1, Cmr3, Cmr4, Cmr5, Cmr6, Csb1, Csb2, Csb3, Csx17, Csx14, Csx10, Csx16, CsaX, Csx3, Csx1, Csx15, Csf1, Csf2, Csf3, Csf4 (dinG), and/or Csf5, or a fragment thereof), wherein the repeat sequence may be linked to the 5′ end and/or the 3′ end of the spacer sequence. The design of a gRNA of this invention may be based on a Type I, Type II, Type III, Type IV, Type V, or Type VI CRISPR-Cas system.

[0269] In some embodiments, a Cas12a gRNA may comprise, from 5′ to 3′, a repeat sequence (full length or portion thereof (“handle”); e.g., pseudoknot-like structure) and a spacer sequence.

[0270] In some embodiments, a guide nucleic acid may comprise more than one repeat sequence-spacer sequence (e.g., 2, 3, 4, 5, 6, 7, 8, 9, 10, or more repeat-spacer sequences) (e.g., repeat-spacer-repeat, e.g., repeat-spacer-repeat-spacer-repeat-spacer-repeat-spacer-repeat-spacer, and the like). The guide nucleic acids of this invention are synthetic, human-made and not found in nature. A gRNA can be quite long and may be used as an aptamer (like in the MS2 recruitment strategy) or other RNA structures hanging off the spacer.

[0271] A “repeat sequence” as used herein, refers to, for example, any repeat sequence of a wild-type CRISPR Cas locus (e.g., a Cas9 locus, a Cas12a locus, a C2c1 locus, etc.) or a repeat sequence of a synthetic crRNA that is functional with the CRISPR-Cas effector protein encoded by the nucleic acid constructs of the invention. A repeat sequence useful with this invention can be any known or later identified repeat sequence of a CRISPR-Cas locus (e.g., Type I, Type II, Type III, Type IV, Type V or Type VI) or it can be a synthetic repeat designed to function in a Type I, II, III, IV, V or VI CRISPR-Cas system. A repeat sequence may comprise a hairpin structure and/or a stem loop structure. In some embodiments, a repeat sequence may form a pseudoknot-like structure at its 5′ end (i.e., “handle”). Thus, in some embodiments, a repeat sequence can be identical to or substantially identical to a repeat sequence from wild-type Type I CRISPR-Cas loci, Type II, CRISPR-Cas loci, Type III, CRISPR-Cas loci, Type IV CRISPR-Cas loci, Type V CRISPR-Cas loci and/or Type VI CRISPR-Cas loci. A repeat sequence from a wild-type CRISPR-Cas locus may be determined through established algorithms, such as using the CRISPRfinder offered through CRISPRdb (see, Grissa et al. Nucleic Acids Res. 35(Web Server issue):W52-7). In some embodiments, a repeat sequence or portion thereof is linked at its 3′ end to the 5′ end of a spacer sequence, thereby forming a repeat-spacer sequence (e.g., guide nucleic acid, guide RNA/DNA, crRNA, crDNA).

[0272] In some embodiments, a repeat sequence comprises, consists essentially of, or consists of at least 10 nucleotides depending on the particular repeat and whether the guide nucleic acid comprising the repeat is processed or unprocessed (e.g., about 10, 11, 12, 13, 14, 15, 16, 17, 18, 19, 20, 21, 22, 23, 24, 25, 26, 27, 28, 29, 30, 31, 32, 33, 34, 35, 36, 37, 38, 39, 40, 41, 42, 43, 44, 45, 46, 47, 48, 49, 50 to 100 or more nucleotides, or any range or value therein). In some embodiments, a repeat sequence comprises, consists essentially of, or consists of about 10 to about 20, about 10 to about 30, about 10 to about 45, about 10 to about 50, about 15 to about 30, about 15 to about 40, about 15 to about 45, about 15 to about 50, about 20 to about 30, about 20 to about 40, about 20 to about 50, about 30 to about 40, about 40 to about 80, about 50 to about 100 or more nucleotides.

[0273] A repeat sequence linked to the 5′ end of a spacer sequence can comprise a portion of a repeat sequence (e.g., 5, 6, 7, 8, 9, 10, 11, 12, 13, 14, 15, 16, 17, 18, 19, 20, 21, 22, 23, 24, 25, 26, 27, 28, 29, 30, 31, 32, 33, 34, 35 or more contiguous nucleotides of a wild type repeat sequence). In some embodiments, a portion of a repeat sequence linked to the 5′ end of a spacer sequence can be about five to about ten consecutive nucleotides in length (e.g., about 5, 6, 7, 8, 9, 10 nucleotides) and have at least 90% sequence identity (e.g., at least about 90%, 91%, 92%, 93%, 94%, 95%, 96%, 97%, 98%, 99%, or more) to the same region (e.g., 5′ end) of a wild type CRISPR Cas repeat nucleotide sequence. In some embodiments, a portion of a repeat sequence may comprise a pseudoknot-like structure at its 5′ end (e.g., “handle”).

[0274] A “spacer sequence” as used herein is a nucleotide sequence that is complementary to a target nucleic acid (e.g., target DNA) (e.g., protospacer) (e.g., a portion of consecutive nucleotides of a CKX gene, wherein the CKX gene (a) comprises a sequence having at least 80% sequence identity to any one of the nucleotide sequences of SEQ ID NOs:72, 73, 75, 76, 78, 79, 81, 82, 84, 87, 88, or 91; (b) comprises a region having at least 80% sequence identity to any one of the nucleotide sequences of SEQ ID NOs:93-98; and/or (c) encodes a polypeptide having at least 80% sequence identity to any one of the amino acid sequences of SEQ ID NOs:74, 77, 80, 83, 89, or 92. A spacer sequence can be fully complementary or substantially complementary (e.g., at least about 70% complementary (e.g., about 70%, 71%, 72%, 73%, 74%, 75%, 76%, 77%, 78%, 79%, 80%, 81%, 82%, 83%, 84%, 85%, 86%, 87%, 88%, 89%, 90%, 91%, 92%, 93%, 94%, 95%, 96%, 97%, 98%, 99%, or more)) to a target nucleic acid. In some embodiments, the spacer sequence can have one, two, three, four, or five mismatches as compared to the target nucleic acid, which mismatches can be contiguous or noncontiguous. In some embodiments, the spacer sequence can have 70% complementarity to a target nucleic acid. In other embodiments, the spacer nucleotide sequence can have 80% complementarity to a target nucleic acid. In still other embodiments, the spacer nucleotide sequence can have 85%, 90%, 95%, 96%, 97%, 98%, 99% or 99.5% complementarity, and the like, to the target nucleic acid (protospacer). In some embodiments, the spacer sequence is 100% complementary to the target nucleic acid. A spacer sequence may have a length from about 15 nucleotides to about 30 nucleotides (e.g., 15, 16, 17, 18, 19, 20, 21, 22, 23, 24, 25, 26, 27, 28, 29, or 30 nucleotides, or any range or value therein). Thus, in some embodiments, a spacer sequence may have complete complementarity or substantial complementarity over a region of a target nucleic acid (e.g., protospacer) that is at least about 15 nucleotides to about 30 nucleotides in length. In some embodiments, the spacer is about 20 nucleotides in length. In some embodiments, the spacer is about 21, 22, or 23 nucleotides in length.

[0275] In some embodiments, the 5′ region of a spacer sequence of a guide nucleic acid may be identical to a target DNA, while the 3′ region of the spacer may be substantially complementary to the target DNA (such as for example, a Type V CRISPR-Cas system), or the 3′ region of a spacer sequence of a guide nucleic acid may be identical to a target DNA, while the 5′ region of the spacer may be substantially complementary to the target DNA (such as for example, a Type II CRISPR-Cas system), and therefore, the overall complementarity of the spacer sequence to the target DNA may be less than 100%. Thus, for example, in a guide for a Type V CRISPR-Cas system, the first 1, 2, 3, 4, 5, 6, 7, 8, 9, 10 nucleotides in the 5′ region (i.e., seed region) of, for example, a 20 nucleotide spacer sequence may be 100% complementary to the target DNA, while the remaining nucleotides in the 3′ region of the spacer sequence are substantially complementary (e.g., at least about 70% complementary) to the target DNA. In some embodiments, the first 1 to 8 nucleotides (e.g., the first 1, 2, 3, 4, 5, 6, 7, 8, nucleotides, and any range therein) of the 5′ end of the spacer sequence may be 100% complementary to the target DNA, while the remaining nucleotides in the 3′ region of the spacer sequence are substantially complementary (e.g., at least about 50% complementary (e.g., 50%, 55%, 60%, 65%, 70%, 71%, 72%, 73%, 74%, 75%, 76%, 77%, 78%, 79%, 80%, 81%, 82%, 83%, 84%, 85%, 86%, 87%, 88%, 89%, 90%, 91%, 92%, 93%, 94%, 95%, 96%, 97%, 98%, 99%, or more)) to the target DNA.

[0276] As a further example, in a guide for a Type II CRISPR-Cas system, the first 1, 2, 3, 4, 5, 6, 7, 8, 9, 10 nucleotides in the 3′ region (i.e., seed region) of, for example, a 20 nucleotide spacer sequence may be 100% complementary to the target DNA, while the remaining nucleotides in the 5′ region of the spacer sequence are substantially complementary (e.g., at least about 70% complementary) to the target DNA. In some embodiments, the first 1 to 10 nucleotides (e.g., the first 1, 2, 3, 4, 5, 6, 7, 8, 9, 10 nucleotides, and any range therein) of the 3′ end of the spacer sequence may be 100% complementary to the target DNA, while the remaining nucleotides in the 5′ region of the spacer sequence are substantially complementary (e.g., at least about 50% complementary (e.g., at least about 50%, 55%, 60%, 65%, 70%, 71%, 72%, 73%, 74%, 75%, 76%, 77%, 78%, 79%, 80%, 81%, 82%, 83%, 84%, 85%, 86%, 87%, 88%, 89%, 90%, 91%, 92%, 93%, 94%, 95%, 96%, 97%, 98%, 99%, or more or any range or value therein)) to the target DNA.

[0277] In some embodiments, a seed region of a spacer may be about 8 to about 10 nucleotides in length, about 5 to about 6 nucleotides in length, or about 6 nucleotides in length.

[0278] As used herein, a “target nucleic acid”, “target DNA,” “target nucleotide sequence,” “target region,” or a “target region in the genome” refers to a region of a plant's genome that is fully complementary (100% complementary) or substantially complementary (e.g., at least 70% complementary (e.g., 70%, 71%, 72%, 73%, 74%, 75%, 76%, 77%, 78%, 79%, 80%, 81%, 82%, 83%, 84%, 85%, 86%, 87%, 88%, 89%, 90%, 91%, 92%, 93%, 94%, 95%, 96%, 97%, 98%, 99%, or more)) to a spacer sequence in a guide nucleic acid of this invention. A target region useful for a CRISPR-Cas system may be located immediately 3′ (e.g., Type V CRISPR-Cas system) or immediately 5′ (e.g., Type II CRISPR-Cas system) to a PAM sequence in the genome of the organism (e.g., a plant genome). A target region may be selected from any region of at least 15 consecutive nucleotides (e.g., 16, 17, 18, 19, 20, 21, 22, 23, 24, 25, 26, 27, 28, 29, 30 nucleotides, and the like) located immediately adjacent to a PAM sequence.

[0279] A “protospacer sequence” refers to the target double stranded DNA and specifically to the portion of the target DNA (e.g., or target region in the genome) that is fully or substantially complementary (and hybridizes) to the spacer sequence of the CRISPR repeat-spacer sequences (e.g., guide nucleic acids, CRISPR arrays, crRNAs).

[0280] In the case of Type V CRISPR-Cas (e.g., Cas12a) systems and Type II CRISPR-Cas (Cas9) systems, the protospacer sequence is flanked by (e.g., immediately adjacent to) a protospacer adjacent motif (PAM). For Type IV CRISPR-Cas systems, the PAM is located at the 5′ end on the non-target strand and at the 3′ end of the target strand (see below, as an example).

```
        5′-NNNNNNNNNNNNNNNNNNN-3′ RNA Spacer(SEQ ID NO: 42)
            |||||||||||||||||||
3′AAANNNNNNNNNNNNNNNNNNN-5′ Target strand (SEQ ID NO: 43)
    ||||
5′TTTNNNNNNNNNNNNNNNNNNN-3′ Non-target strand (SEQ ID NO: 44)
```

[0281] In the case of Type II CRISPR-Cas (e.g., Cas9) systems, the PAM is located immediately 3′ of the target region. The PAM for Type I CRISPR-Cas systems is located 5′ of the target strand. There is no known PAM for Type III CRISPR-Cas systems. Makarova et al. describes the nomenclature for all the classes, types and subtypes of CRISPR systems (Nature Reviews Microbiology 13:722-736 (2015)). Guide structures and PAMs are described in by R. Barrangou (Genome Biol. 16:247 (2015)).

[0282] Canonical Cas12a PAMs are T rich. In some embodiments, a canonical Cas12a PAM sequence may be 5′-TTN, 5′-TTTN, or 5′-TTTV. In some embodiments, canonical Cas9 (e.g., S. pyogenes) PAMs may be 5′-NGG-3′. In some embodiments, non-canonical PAMs may be used but may be less efficient.

[0283] Additional PAM sequences may be determined by those skilled in the art through established experimental and computational approaches. Thus, for example, experimental approaches include targeting a sequence flanked by all possible nucleotide sequences and identifying sequence members that do not undergo targeting, such as through the transformation of target plasmid DNA (Esvelt et al. 2013. Nat. Methods 10:1116-1121; Jiang et al. 2013. Nat. Biotechnol. 31:233-239). In some aspects, a computational approach can include performing BLAST searches of natural spacers to identify the original target DNA sequences in bacteriophages or plasmids and aligning these sequences to determine conserved sequences adjacent to the target sequence (Briner and Barrangou. 2014. Appl. Environ. Microbiol. 80:994-1001; Mojica et al. 2009. Microbiology 155:733-740).

[0284] In some embodiments, the present invention provides expression cassettes and/or vectors comprising the nucleic acid constructs of the invention (e.g., one or more components of an editing system of the invention). In some embodiments, expression cassettes and/or vectors comprising the nucleic acid constructs of the invention and/or one or more guide nucleic acids may be provided. In some embodiments, a nucleic acid construct of the invention encoding a base editor (e.g., a construct comprising a CRISPR-Cas effector protein and a deaminase domain (e.g., a fusion protein)) or the components for base editing (e.g., a CRISPR-Cas effector protein fused to a peptide tag or an affinity polypeptide, a deaminase domain fused to a peptide tag or an affinity polypeptide, and/or a UGI fused to a peptide tag or an affinity polypeptide), may be comprised on the same or on a separate expression cassette or vector from that comprising the one or more guide nucleic acids. When the nucleic acid construct encoding a base editor or the components for base editing is/are comprised on separate expression cassette(s) or vector(s) from that comprising the guide nucleic acid, a target nucleic acid may be contacted with (e.g., provided with) the expression cassette(s) or vector(s) encoding the base editor or components for base editing in any order from one another and the guide nucleic acid, e.g., prior to, concurrently with, or after the expression cassette comprising the guide nucleic acid is provided (e.g., contacted with the target nucleic acid).

[0285] Fusion proteins of the invention may comprise sequence-specific nucleic acid binding domains, CRISPR-Cas polypeptides, and/or deaminase domains fused to peptide tags or affinity polypeptides that interact with the peptide tags, as known in the art, for use in recruiting the deaminase to the target nucleic acid. Methods of recruiting may also comprise guide nucleic acids linked to RNA recruiting motifs and deaminases fused to affinity polypeptides capable of interacting with RNA recruiting motifs, thereby recruiting the deaminase to the target nucleic acid. Alternatively, chemical interactions may be used to recruit polypeptides (e.g., deaminases) to a target nucleic acid.

[0286] A peptide tag (e.g., epitope) useful with this invention may include, but is not limited to, a GCN4 peptide tag (e.g., Sun-Tag), a c-Myc affinity tag, an HA affinity tag, a His affinity tag, an S affinity tag, a methionine-His affinity tag, an RGD-His affinity tag, a FLAG octapeptide, a strep tag or strep tag II, a V5 tag, and/or a VSV-G epitope. In some embodiments, a peptide tag may also include phosphorylated tyrosines in specific sequence contexts recognized by SH2 domains, characteristic consensus sequences containing phosphoserines recognized by 14-3-3 proteins, proline rich peptide motifs recognized by SH3 domains, PDZ protein interaction domains or the PDZ signal sequences, and an AGO hook motif from plants. Peptide tags are disclosed in WO2018/136783 and U.S. Patent Application Publication No. 2017/0219596, which are incorporated by reference for their disclosures of peptide tags. Any epitope that may be linked to a polypeptide and for which there is a corresponding affinity polypeptide that may be linked to another polypeptide may be used with this invention as a peptide tag. A peptide tag may comprise or be present in one copy or in 2 or more copies of the peptide tag (e.g., multimerized peptide tag or multimerized epitope) (e.g., about 2, 3, 4, 5, 6, 7, 8, 9, 10, 11, 12, 13, 14, 15, 16, 17, 18, 9, 20, 21, 22, 23, 24, or 25 or more peptide tags). When multimerized, the peptide tags may be fused directly to one another or they may be linked to one another via one or more amino acids (e.g., 1, 2, 3, 4, 5, 6, 7, 8, 9, 10, 11, 12, 13, 14, 15, 16, 17, 18, 19, 20 or more amino acids, optionally about 3 to about 10, about 4 to about 10, about 5 to about 10, about 5 to about 15, or about 5 to about 20 amino acids, and the like, and any value or range therein. In some embodiments, an affinity polypeptide that interacts with/binds to a peptide tag may be an antibody. In some embodiments, the antibody may be a scFv antibody. In some embodiments, an affinity polypeptide that binds to a peptide tag may be synthetic (e.g., evolved for affinity interaction) including, but not limited to, an affibody, an anticalin, a monobody and/or a DARPin (see, e.g., Sha et al., Protein Sci. 26(5):910-924 (2017)); Gilbreth (Curr Opin Struc Biol 22(4):413-420 (2013)), U.S. Pat. No. 9,982,053, each of which are incorporated by reference in their entireties for the teachings relevant to affibodies, anticalins, monobodies and/or DARPins. Example peptide tag sequences and their affinity polypeptides include, but are not limited to, the amino acid sequences of SEQ ID NOs:45-47.

[0287] In some embodiments, a guide nucleic acid may be linked to an RNA recruiting motif, and a polypeptide to be recruited (e.g., a deaminase) may be fused to an affinity polypeptide that binds to the RNA recruiting motif, wherein the guide binds to the target nucleic acid and the RNA recruiting motif binds to the affinity polypeptide, thereby recruiting the polypeptide to the guide and contacting the target nucleic acid with the polypeptide (e.g., deaminase). In some embodiments, two or more polypeptides may be recruited to a guide nucleic acid, thereby contacting the target nucleic acid with two or more polypeptides (e.g., deaminases). Example RNA recruiting motifs and their affinity polypeptides include, but are not limited to, the sequences of SEQ ID NOs:48-58.

[0288] In some embodiments, a polypeptide fused to an affinity polypeptide may be a reverse transcriptase and the guide nucleic acid may be an extended guide nucleic acid linked to an RNA recruiting motif. In some embodiments, an RNA recruiting motif may be located on the 3′ end of the extended portion of an extended guide nucleic acid (e.g., 5′-3′, repeat-spacer-extended portion (RT template-primer binding site)-RNA recruiting motif). In some embodiments, an RNA recruiting motif may be embedded in the extended portion.

[0289] In some embodiments of the invention, an extended guide RNA and/or guide RNA may be linked to one or to two or more RNA recruiting motifs (e.g., 1, 2, 3, 4, 5, 6, 7, 8, 9, 10 or more motifs; e.g., at least 10 to about 25 motifs), optionally wherein the two or more RNA recruiting motifs may be the same RNA recruiting motif or different RNA recruiting motifs. In some embodiments, an RNA recruiting motif and corresponding affinity polypeptide may include, but is not limited, to a telomerase Ku binding motif (e.g., Ku binding hairpin) and the corresponding affinity polypeptide Ku (e.g., Ku heterodimer), a telomerase Sm7 binding motif and the corresponding affinity polypeptide Sm7, an MS2 phage operator stem-loop and the corresponding affinity polypeptide MS2 Coat Protein (MCP), a PP7 phage operator stem-loop and the corresponding affinity polypeptide PP7 Coat Protein (PCP), an SfMu phage Com stem-loop and the corresponding affinity polypeptide Com RNA binding protein, a PUF binding site (PBS) and the affinity polypeptide Pumilio/fem-3 mRNA binding factor (PUF), and/or a synthetic RNA-aptamer and the aptamer ligand as the corresponding affinity polypeptide. In some embodiments, the RNA recruiting motif and corresponding affinity polypeptide may be an MS2 phage operator stem-loop and the affinity polypeptide MS2 Coat Protein (MCP). In some embodiments, the RNA recruiting motif and corresponding affinity polypeptide may be a PUF binding site (PBS) and the affinity polypeptide Pumilio/fem-3 mRNA binding factor (PUF).

[0290] In some embodiments, the components for recruiting polypeptides and nucleic acids may those that function through chemical interactions that may include, but are not limited to, rapamycin-inducible dimerization of FRB—FKBP; Biotin-streptavidin; SNAP tag; Halo tag; CLIP tag; DmrA-DmrC heterodimer induced by a compound; bifunctional ligand (e.g., fusion of two protein-binding chemicals together, e.g., dihyrofolate reductase (DHFR).

[0291] In some embodiments, the nucleic acid constructs, expression cassettes or vectors of the invention that are optimized for expression in a plant may be about 70% to 100% identical (e.g., about 70%, 71%, 72%, 73%, 74%, 75%, 76%, 77%, 78%, 79%, 80%, 81%, 82%, 83%, 84%, 85%, 86%, 87%, 88%, 89%, 90%, 91%, 92%, 93%, 94%, 95%, 96%, 97%, 98%, 99%, 99.5% or 100%) to the nucleic acid constructs, expression cassettes or vectors comprising the same polynucleotide(s) but which have not been codon optimized for expression in a plant.

[0292] Further provided herein are cells comprising one or more polynucleotides, guide nucleic acids, nucleic acid constructs, expression cassettes or vectors of the invention.

[0293] The nucleic acid constructs of the invention (e.g., a construct comprising a sequence specific nucleic acid binding domain, a CRISPR-Cas effector domain, a deaminase domain, reverse transcriptase (RT), RT template and/or a guide nucleic acid, etc.) and expression cassettes/vectors comprising the same may be used as an editing system of this invention for modifying target nucleic acids and/or their expression.

[0294] A target nucleic acid of any plant or plant part (or groupings of plants, for example, into a genus or higher order classification) may be modified (e.g., mutated, e.g., base edited, cleaved, nicked, etc.) using the polypeptides, polynucleotides, ribonucleoproteins (RNPs), nucleic acid constructs, expression cassettes, and/or vectors of the invention including an angiosperm, a gymnosperm, a monocot, a dicot, a C3, C4, CAM plant, a bryophyte, a fern and/or fern ally, a microalgae, and/or a macroalgae. A plant and/or plant part that may be modified as described herein may be a plant and/or plant part of any plant species/variety/cultivar. In some embodiments, a plant that may be modified as described herein is a monocot. In some embodiments, a plant that may be modified as described herein is a dicot.

[0295] The term “plant part,” as used herein, includes but is not limited to reproductive tissues (e.g., petals, sepals, stamens, pistils, receptacles, anthers, pollen, flowers, fruits, flower bud, ovules, seeds, embryos, nuts, kernels, ears, cobs and husks); vegetative tissues (e.g., petioles, stems, roots, root hairs, root tips, pith, coleoptiles, stalks, shoots, branches, bark, apical meristem, axillary bud, cotyledon, hypocotyls, and leaves); vascular tissues (e.g., phloem and xylem); specialized cells such as epidermal cells, parenchyma cells, chollenchyma cells, schlerenchyma cells, stomates, guard cells, cuticle, mesophyll cells; callus tissue; and cuttings. The term “plant part” also includes plant cells, including plant cells that are intact in plants and/or parts of plants, plant protoplasts, plant tissues, plant organs, plant cell tissue cultures, plant calli, plant clumps, and the like. As used herein, “shoot” refers to the above ground parts including the leaves and stems. As used herein, the term “tissue culture” encompasses cultures of tissue, cells, protoplasts and callus.

[0296] As used herein, “plant cell” refers to a structural and physiological unit of the plant, which typically comprise a cell wall but also includes protoplasts. A plant cell of the present invention can be in the form of an isolated single cell or can be a cultured cell or can be a part of a higher-organized unit such as, for example, a plant tissue (including callus) or a plant organ. In some embodiments, a plant cell can be an algal cell. A “protoplast” is an isolated plant cell without a cell wall or with only parts of the cell wall. Thus, in some embodiments of the invention, a transgenic cell comprising a nucleic acid molecule and/or nucleotide sequence of the invention is a cell of any plant or plant part including, but not limited to, a root cell, a leaf cell, a tissue culture cell, a seed cell, a flower cell, a fruit cell, a pollen cell, and the like. In some aspects of the invention, the plant part can be a plant germplasm. In some aspects, a plant cell can be non-propagating plant cell that does not regenerate into a plant.

[0297] “Plant cell culture” means cultures of plant units such as, for example, protoplasts, cell culture cells, cells in plant tissues, pollen, pollen tubes, ovules, embryo sacs, zygotes and embryos at various stages of development.

[0298] As used herein, a “plant organ” is a distinct and visibly structured and differentiated part of a plant such as a root, stem, leaf, flower bud, or embryo.

[0299] “Plant tissue” as used herein means a group of plant cells organized into a structural and functional unit. Any tissue of a plant in planta or in culture is included. This term includes, but is not limited to, whole plants, plant organs, plant seeds, tissue culture and any groups of plant cells organized into structural and/or functional units. The use of this term in conjunction with, or in the absence of, any specific type of plant tissue as listed above or otherwise embraced by this definition is not intended to be exclusive of any other type of plant tissue.

[0300] In some embodiments of the invention, a transgenic tissue culture or transgenic plant cell culture is provided, wherein the transgenic tissue or cell culture comprises a nucleic acid molecule/nucleotide sequence of the invention. In some embodiments, transgenes may be eliminated from a plant developed from the transgenic tissue or cell by breeding of the transgenic plant with a non-transgenic plant and selecting among the progeny for the plants comprising the desired gene edit and not the transgenes used in producing the edit.

[0301] Any plant comprising an endogenous CKX gene that is capable of regulating cytokinin balance in favor of active cytokinins in a plant may be modified as described herein to increase yield in the plant (e.g., increased seed number, increased seed size; increased pod number; or improved yield traits as a result of increased planting density of a plant of the invention versus planting a control plant at an increased density).

[0302] Non-limiting examples of plants that may be modified as described herein may include, but are not limited to, turf grasses (e.g., bluegrass, bentgrass, ryegrass, fescue), feather reed grass, tufted hair grass, miscanthus, arundo, switchgrass, vegetable crops, including artichokes, kohlrabi, arugula, leeks, asparagus, lettuce (e.g., head, leaf, romaine), malanga, melons (e.g., muskmelon, watermelon, crenshaw, honeydew, cantaloupe), cole crops (e.g., brussels sprouts, cabbage, cauliflower, broccoli, collards, kale, chinese cabbage, bok choy), cardoni, carrots, napa, okra, onions, celery, parsley, chick peas, parsnips, chicory, peppers, potatoes, cucurbits (e.g., marrow, cucumber, zucchini, squash, pumpkin, honeydew melon, watermelon, cantaloupe), radishes, dry bulb onions, rutabaga, eggplant, salsify, escarole, shallots, endive, garlic, spinach, green onions, squash, greens, beet (sugar beet and fodder beet), sweet potatoes, chard, horseradish, tomatoes, turnips, and spices; a fruit crop such as apples, apricots, cherries, nectarines, peaches, pears, plums, prunes, cherry, quince, fig, nuts (e.g., chestnuts, pecans, pistachios, hazelnuts, pistachios, peanuts, walnuts, macadamia nuts, almonds, and the like), citrus (e.g., clementine, kumquat, orange, grapefruit, tangerine, mandarin, lemon, lime, and the like), blueberries, black raspberries, boysenberries, cranberries, currants, gooseberries, loganberries, raspberries, strawberries, blackberries, grapes (wine and table), avocados, bananas, kiwi, persimmons, pomegranate, pineapple, tropical fruits, pomes, melon, mango, papaya, and lychee, a field crop plant such as clover, alfalfa, timothy, evening primrose, meadow foam, corn/maize (field, sweet, popcorn), hops, jojoba, buckwheat, safflower, quinoa, wheat, rice, barley, rye, millet, sorghum, oats, triticale, sorghum, tobacco, kapok, a leguminous plant (beans (e.g., green and dried), lentils, peas, soybeans), an oil plant (rape, canola, mustard, poppy, olive, sunflower, coconut, castor oil plant, cocoa bean, groundnut, oil palm), duckweed, Arabidopsis, a fiber plant (cotton, flax, hemp, jute), Cannabis (e.g., Cannabis sativa, Cannabis indica, and Cannabis ruderalis), lauraceae (cinnamon, camphor), or a plant such as coffee, sugar cane, tea, and natural rubber plants; and/or a bedding plant such as a flowering plant, a cactus, a succulent and/or an ornamental plant (e.g., roses, tulips, violets), as well as trees such as forest trees (broad-leaved trees and evergreens, such as conifers; e.g., elm, ash, oak, maple, fir, spruce, cedar, pine, birch, cypress, eucalyptus, willow), as well as shrubs and other nursery stock. In some embodiments, the nucleic acid constructs of the invention and/or expression cassettes and/or vectors encoding the same may be used to modify maize, soybean, wheat, canola, rice, tomato, pepper, or sunflower.

[0303] In some embodiments, a plant that may be modified as described herein may include, but is not limited to, corn, soybean, canola, wheat, rice, cotton, sugarcane, sugar beet, barley, oats, alfalfa, sunflower, safflower, oil palm, sesame, coconut, tobacco, potato, sweet potato, cassava, coffee, apple, plum, apricot, peach, cherry, pear, fig, banana, citrus, cocoa, avocado, olive, almond, walnut, strawberry, watermelon, pepper, grape, tomato, cucumber, or a Brassica spp (e.g., B. napus, B. oleraceae, B. rapa, B. juncea, and/or B. nigra). In some embodiments, a plant that may be modified as described herein is soybean (i.e., Glycine max).

[0304] Thus, plants or plant cultivars which are to be treated with preference in accordance with the invention include all plants which, through genetic modification, received genetic material which imparts particular advantageous useful properties (“traits”) to these plants. Examples of such properties are better plant growth, vigor, stress tolerance, standability, lodging resistance, nutrient uptake, plant nutrition, and/or yield, in particular improved growth, increased tolerance to high or low temperatures, increased tolerance to drought or to levels of water or soil salinity, enhanced flowering performance, easier harvesting, accelerated ripening, higher yields, higher quality and/or a higher nutritional value of the harvested products, better storage life and/or processability of the harvested products.

[0305] Further examples of such properties are an increased resistance against animal and microbial pests, such as against insects, arachnids, nematodes, mites, slugs and snails owing, for example, to toxins formed in the plants. Among DNA sequences encoding proteins which confer properties of tolerance to such animal and microbial pests, in particular insects, mention will particularly be made of the genetic material from Bacillus thuringiensis encoding the Bt proteins widely described in the literature and well known to those skilled in the art. Mention will also be made of proteins extracted from bacteria such as Photorhabdus (WO97/17432 and WO98/08932). In particular, mention will be made of the Bt Cry or VIP proteins which include the CrylA, CryIAb, CryIAc, CryIIA, CryIIIA, CryIIIB2, Cry9c Cry2Ab, Cry3Bb and CryIF proteins or toxic fragments thereof and also hybrids or combinations thereof, especially the CrylF protein or hybrids derived from a CrylF protein (e.g., hybrid CrylA-CrylF proteins or toxic fragments thereof), the CrylA-type proteins or toxic fragments thereof, preferably the CrylAc protein or hybrids derived from the CrylAc protein (e.g., hybrid CrylAb-CrylAc proteins) or the CrylAb or Bt2 protein or toxic fragments thereof, the Cry2Ae, Cry2Af or Cry2Ag proteins or toxic fragments thereof, the CrylA.105 protein or a toxic fragment thereof, the VIP3Aa19 protein, the VIP3Aa20 protein, the VIP3A proteins produced in the COT202 or COT203 cotton events, the VIP3Aa protein or a toxic fragment thereof as described in Estruch et al. (1996), Proc Natl Acad Sci US A. 28; 93(11):5389-94, the Cry proteins as described in WO2001/47952, the insecticidal proteins from Xenorhabdus (as described in WO98/50427), Serratia (particularly from S. entomophila) or Photorhabdus species strains, such as Tc-proteins from Photorhabdus as described in WO98/08932. Also any variants or mutants of any one of these proteins differing in some amino acids (1-10, preferably 1-5) from any of the above named sequences, particularly the sequence of their toxic fragment, or which are fused to a transit peptide, such as a plastid transit peptide, or another protein or peptide, is included herein.

[0306] Another and particularly emphasized example of such properties is conferred tolerance to one or more herbicides, for example imidazolinones, sulphonylureas, glyphosate or phosphinothricin. Among DNA sequences encoding proteins (i.e., polynucleotides of interest) which confer properties of tolerance to certain herbicides on the transformed plant cells and plants, mention will be particularly be made to the bar or PAT gene or the Streptomyces coelicolor gene described in WO2009/152359 which confers tolerance to glufosinate herbicides, a gene encoding a suitable EPSPS (5-Enolpyruvylshikimat-3-phosphat-Synthase) which confers tolerance to herbicides having EPSPS as a target, especially herbicides such as glyphosate and its salts, a gene encoding glyphosate-n-acetyltransferase, or a gene encoding glyphosate oxidoreductase. Further suitable herbicide tolerance traits include at least one ALS (acetolactate synthase) inhibitor (e.g., WO2007/024782), a mutated Arabidopsis ALS/AHAS gene (e.g., U.S. Pat. No. 6,855,533), genes encoding 2,4-D-monooxygenases conferring tolerance to 2,4-D (2,4-dichlorophenoxyacetic acid) and genes encoding Dicamba monooxygenases conferring tolerance to dicamba (3,6-dichloro-2-methoxybenzoic acid).

[0307] Further examples of such properties are increased resistance against phytopathogenic fungi, bacteria and/or viruses owing, for example, to systemic acquired resistance (SAR), systemin, phytoalexins, elicitors and also resistance genes and correspondingly expressed proteins and toxins.

[0308] Particularly useful transgenic events in transgenic plants or plant cultivars which can be treated with preference in accordance with the invention include Event 531/PV-GHBK04 (cotton, insect control, described in WO2002/040677), Event 1143-14A (cotton, insect control, not deposited, described in WO2006/128569); Event 1143-51B (cotton, insect control, not deposited, described in WO2006/128570); Event 1445 (cotton, herbicide tolerance, not deposited, described in US-A 2002-120964 or WO2002/034946); Event 17053 (rice, herbicide tolerance, deposited as PTA-9843, described in WO2010/117737); Event 17314 (rice, herbicide tolerance, deposited as PTA-9844, described in WO2010/117735); Event 281-24-236 (cotton, insect control—herbicide tolerance, deposited as PTA-6233, described in WO2005/103266 or US-A 2005-216969); Event 3006-210-23 (cotton, insect control—herbicide tolerance, deposited as PTA-6233, described in US-A 2007-143876 or WO2005/103266); Event 3272 (corn, quality trait, deposited as PTA-9972, described in WO2006/098952 or US-A 2006-230473); Event 33391 (wheat, herbicide tolerance, deposited as PTA-2347, described in WO2002/027004), Event 40416 (corn, insect control—herbicide tolerance, deposited as ATCC PTA-11508, described in WO 11/075593); Event 43A47 (corn, insect control—herbicide tolerance, deposited as ATCC PTA-11509, described in WO2011/075595); Event 5307 (corn, insect control, deposited as ATCC PTA-9561, described in WO2010/077816); Event ASR-368 (bent grass, herbicide tolerance, deposited as ATCC PTA-4816, described in US-A 2006-162007 or WO2004/053062); Event B16 (corn, herbicide tolerance, not deposited, described in US-A 2003-126634); Event BPS-CV127-9 (soybean, herbicide tolerance, deposited as NCIMB No. 41603, described in WO2010/080829); Event BLRI (oilseed rape, restoration of male sterility, deposited as NCIMB 41193, described in WO2005/074671), Event CE43-67B (cotton, insect control, deposited as DSM ACC2724, described in US-A 2009-217423 or WO2006/128573); Event CE44-69D (cotton, insect control, not deposited, described in US-A 2010-0024077); Event CE44-69D (cotton, insect control, not deposited, described in WO2006/128571); Event CE46-02A (cotton, insect control, not deposited, described in WO2006/128572); Event COT102 (cotton, insect control, not deposited, described in US-A 2006-130175 or WO2004/039986); Event COT202 (cotton, insect control, not deposited, described in US-A 2007-067868 or WO2005/054479); Event COT203 (cotton, insect control, not deposited, described in WO2005/054480)); Event DAS21606-3/1606 (soybean, herbicide tolerance, deposited as PTA-11028, described in WO2012/033794), Event DAS40278 (corn, herbicide tolerance, deposited as ATCC PTA-10244, described in WO2011/022469); Event DAS-44406-6/pDAB8264.44.06.1 (soybean, herbicide tolerance, deposited as PTA-11336, described in WO2012/075426), Event DAS-14536-7/pDAB8291.45.36.2 (soybean, herbicide tolerance, deposited as PTA-11335, described in WO2012/075429), Event DAS-59122-7 (corn, insect control—herbicide tolerance, deposited as ATCC PTA 11384, described in US-A 2006-070139); Event DAS-59132 (corn, insect control—herbicide tolerance, not deposited, described in WO2009/100188); Event DAS68416 (soybean, herbicide tolerance, deposited as ATCC PTA-10442, described in WO2011/066384 or WO2011/066360); Event DP-098140-6 (corn, herbicide tolerance, deposited as ATCC PTA-8296, described in US-A 2009-137395 or WO 08/112019); Event DP-305423-1 (soybean, quality trait, not deposited, described in US-A 2008-312082 or WO2008/054747); Event DP-32138-1 (corn, hybridization system, deposited as ATCC PTA-9158, described in US-A 2009-0210970 or WO2009/103049); Event DP-356043-5 (soybean, herbicide tolerance, deposited as ATCC PTA-8287, described in US-A 2010-0184079 or WO2008/002872); EventEE-I (brinjal, insect control, not deposited, described in WO 07/091277); Event Fil 17 (corn, herbicide tolerance, deposited as ATCC 209031, described in US-A 2006-059581 or WO 98/044140); Event FG72 (soybean, herbicide tolerance, deposited as PTA-11041, described in WO2011/063413), Event GA21 (corn, herbicide tolerance, deposited as ATCC 209033, described in US-A 2005-086719 or WO 98/044140); Event GG25 (corn, herbicide tolerance, deposited as ATCC 209032, described in US-A 2005-188434 or WO98/044140); Event GHB119 (cotton, insect control—herbicide tolerance, deposited as ATCC PTA-8398, described in WO2008/151780); Event GHB614 (cotton, herbicide tolerance, deposited as ATCC PTA-6878, described in US-A 2010-050282 or WO2007/017186); Event GJ11 (corn, herbicide tolerance, deposited as ATCC 209030, described in US-A 2005-188434 or WO98/044140); Event GM RZ13 (sugar beet, virus resistance, deposited as NCIMB-41601, described in WO2010/076212); Event H7-1 (sugar beet, herbicide tolerance, deposited as NCIMB 41158 or NCIMB 41159, described in US-A 2004-172669 or WO 2004/074492); Event JOPLIN1 (wheat, disease tolerance, not deposited, described in US-A 2008-064032); Event LL27 (soybean, herbicide tolerance, deposited as NCIMB41658, described in WO2006/108674 or US-A 2008-320616); Event LL55 (soybean, herbicide tolerance, deposited as NCIMB 41660, described in WO 2006/108675 or US-A 2008-196127); Event LLcotton25 (cotton, herbicide tolerance, deposited as ATCC PTA-3343, described in WO2003/013224 or US-A 2003-097687); Event LLRICE06 (rice, herbicide tolerance, deposited as ATCC 203353, described in U.S. Pat. No. 6,468,747 or WO2000/026345); Event LLRice62 (rice, herbicide tolerance, deposited as ATCC 203352, described in WO2000/026345), Event LLRICE601 (rice, herbicide tolerance, deposited as ATCC PTA-2600, described in US-A 2008-2289060 or WO2000/026356); Event LY038 (corn, quality trait, deposited as ATCC PTA-5623, described in US-A 2007-028322 or WO2005/061720); Event MIR162 (corn, insect control, deposited as PTA-8166, described in US-A 2009-300784 or WO2007/142840); Event MIR604 (corn, insect control, not deposited, described in US-A 2008-167456 or WO2005/103301); Event MON15985 (cotton, insect control, deposited as ATCC PTA-2516, described in US-A 2004-250317 or WO2002/100163); Event MON810 (corn, insect control, not deposited, described in US-A 2002-102582); Event MON863 (corn, insect control, deposited as ATCC PTA-2605, described in WO2004/011601 or US-A 2006-095986); Event MON87427 (corn, pollination control, deposited as ATCC PTA-7899, described in WO2011/062904); Event MON87460 (corn, stress tolerance, deposited as ATCC PTA-8910, described in WO2009/111263 or US-A 2011-0138504); Event MON87701 (soybean, insect control, deposited as ATCC PTA-8194, described in US-A 2009-130071 or WO2009/064652); Event MON87705 (soybean, quality trait—herbicide tolerance, deposited as ATCC PTA-9241, described in US-A 2010-0080887 or WO2010/037016); Event MON87708 (soybean, herbicide tolerance, deposited as ATCC PTA-9670, described in WO2011/034704); Event MON87712 (soybean, yield, deposited as PTA-10296, described in WO2012/051199), Event MON87754 (soybean, quality trait, deposited as ATCC PTA-9385, described in WO2010/024976); Event MON87769 (soybean, quality trait, deposited as ATCC PTA-8911, described in US-A 2011-0067141 or WO2009/102873); Event MON88017 (corn, insect control—herbicide tolerance, deposited as ATCC PTA-5582, described in US-A 2008-028482 or WO2005/059103); Event MON88913 (cotton, herbicide tolerance, deposited as ATCC PTA-4854, described in WO2004/072235 or US-A 2006-059590); Event MON88302 (oilseed rape, herbicide tolerance, deposited as PTA-10955, described in WO2011/153186), Event MON88701 (cotton, herbicide tolerance, deposited as PTA-11754, described in WO2012/134808), Event MON89034 (corn, insect control, deposited as ATCC PTA-7455, described in WO 07/140256 or US-A 2008-260932); Event MON89788 (soybean, herbicide tolerance, deposited as ATCC PTA-6708, described in US-A 2006-282915 or WO2006/130436); Event MSl 1 (oilseed rape, pollination control—herbicide tolerance, deposited as ATCC PTA-850 or PTA-2485, described in WO2001/031042); Event MS8 (oilseed rape, pollination control—herbicide tolerance, deposited as ATCC PTA-730, described in WO2001/041558 or US-A 2003-188347); Event NK603 (corn, herbicide tolerance, deposited as ATCC PTA-2478, described in US-A 2007-292854); Event PE-7 (rice, insect control, not deposited, described in WO2008/114282); Event RF3 (oilseed rape, pollination control—herbicide tolerance, deposited as ATCC PTA-730, described in WO2001/041558 or US-A 2003-188347); Event RT73 (oilseed rape, herbicide tolerance, not deposited, described in WO2002/036831 or US-A 2008-070260); Event SYHT0H2/SYN-000H2-5 (soybean, herbicide tolerance, deposited as PTA-11226, described in WO2012/082548), Event T227-1 (sugar beet, herbicide tolerance, not deposited, described in WO2002/44407 or US-A 2009-265817); Event T25 (corn, herbicide tolerance, not deposited, described in US-A 2001-029014 or WO2001/051654); Event T304-40 (cotton, insect control—herbicide tolerance, deposited as ATCC PTA-8171, described in US-A 2010-077501 or WO2008/122406); Event T342-142 (cotton, insect control, not deposited, described in WO2006/128568); Event TC1507 (corn, insect control—herbicide tolerance, not deposited, described in US-A 2005-039226 or WO2004/099447); Event VIP1034 (corn, insect control—herbicide tolerance, deposited as ATCC PTA-3925, described in WO2003/052073), Event 32316 (corn, insect control-herbicide tolerance, deposited as PTA-11507, described in WO2011/084632), Event 4114 (corn, insect control-herbicide tolerance, deposited as PTA-11506, described in WO2011/084621), event EE-GM3/FG72 (soybean, herbicide tolerance, ATCC Accession No PTA-11041) optionally stacked with event EE-GM1/LL27 or event EE-GM2/LL55 (WO2011/063413A2), event DAS-68416-4 (soybean, herbicide tolerance, ATCC Accession No PTA-10442, WO2011/066360A1), event DAS-68416-4 (soybean, herbicide tolerance, ATCC Accession No PTA-10442, WO2011/066384A1), event DP-040416-8 (corn, insect control, ATCC Accession No PTA-11508, WO2011/075593A1), event DP-043A47-3 (corn, insect control, ATCC Accession No PTA-11509, WO2011/075595A1), event DP-004114-3 (corn, insect control, ATCC Accession No PTA-11506, WO2011/084621A1), event DP-032316-8 (corn, insect control, ATCC Accession No PTA-11507, WO2011/084632A1), event MON-88302-9 (oilseed rape, herbicide tolerance, ATCC Accession No PTA-10955, WO2011/153186A1), event DAS-21606-3 (soybean, herbicide tolerance, ATCC Accession No. PTA-11028, WO2012/033794A2), event MON-87712-4 (soybean, quality trait, ATCC Accession No. PTA-10296, WO2012/051199A2), event DAS-44406-6 (soybean, stacked herbicide tolerance, ATCC Accession No. PTA-11336, WO2012/075426A1), event DAS-14536-7 (soybean, stacked herbicide tolerance, ATCC Accession No. PTA-11335, WO2012/075429A1), event SYN-000H2-5 (soybean, herbicide tolerance, ATCC Accession No. PTA-11226, WO2012/082548A2), event DP-061061-7 (oilseed rape, herbicide tolerance, no deposit No available, WO2012071039A1), event DP-073496-4 (oilseed rape, herbicide tolerance, no deposit No available, US2012131692), event 8264.44.06.1 (soybean, stacked herbicide tolerance, Accession No PTA-11336, WO2012075426A2), event 8291.45.36.2 (soybean, stacked herbicide tolerance, Accession No. PTA-11335, WO2012075429A2), event SYHT0H2 (soybean, ATCC Accession No. PTA-11226, WO2012/082548A2), event MON88701 (cotton, ATCC Accession No PTA-11754, WO2012/134808A1), event KK179-2 (alfalfa, ATCC Accession No PTA-11833, WO2013/003558A1), event pDAB8264.42.32.1 (soybean, stacked herbicide tolerance, ATCC Accession No PTA-11993, WO2013/010094A1), event MZDT09Y (corn, ATCC Accession No PTA-13025, WO2013/012775A1).

[0309] The genes/events (e.g., polynucleotides of interest), which impart the desired traits in question, may also be present in combinations with one another in the transgenic plants. Examples of transgenic plants which may be mentioned are the important crop plants, such as cereals (wheat, rice, triticale, barley, rye, oats), maize, soya beans, potatoes, sugar beet, sugar cane, tomatoes, peas and other types of vegetable, cotton, tobacco, oilseed rape and also fruit plants (with the fruits apples, pears, citrus fruits and grapes), with particular emphasis being given to maize, soya beans, wheat, rice, potatoes, cotton, sugar cane, tobacco and oilseed rape. Traits which are particularly emphasized are the increased resistance of the plants to insects, arachnids, nematodes and slugs and snails, as well as the increased resistance of the plants to one or more herbicides.

[0310] Commercially available examples of such plants, plant parts or plant seeds that may be treated with preference in accordance with the invention include commercial products, such as plant seeds, sold or distributed under the GENUITY®, DROUGHTGARD®, SMARTSTAX®, RIB COMPLETE®, ROUNDUP READY®, VT DOUBLE PRO®, VT TRIPLE PRO®, BOLLGARD II®, ROUNDUP READY 2 YIELD®, YIELDGARD®, ROUNDUP READY® 2 XTEN^{DTm}, INTACTA RR2 PRO®, VISTIVE GOLD®, and/or XTENDFLEX™ trade names.

[0311] The invention will now be described with reference to the following examples. It should be appreciated that these examples are not intended to limit the scope of the claims to the invention but rather are intended to be exemplary of certain embodiments. Any variations in the exemplified methods that occur to the skilled artisan are intended to fall within the scope of the invention.

### EXAMPLES

### Example 1. Gene-Editing and Selection of Edited Plants

[0312] Disarmed Agrobacterium tumefaciens was used to introduce a T-DNA cassette expressing a selectable marker and CRISPR Cas gene editing components targeted to create double-strand breaks in CKX gene coding sequences and thereby generate CKX knock-outs. The T-DNA further expressed crRNAs comprising spacers selected from SEQ ID Nos. 99-113 (Table 1). These spacers are programmed to target the CKX coding genes. Different combinations of spacers were used to generate particular combinations of desired CKX knock-outs, including CKX1/2/3, CKX1/2/3/4 and CKX1/3/5/6, as shown in Table 2.

[0313] PCR and next generation sequencing (NGS) were used to confirm that intended genetic changes were achieved. Genomic DNA was isolated from leaf tissue and used as a template in PCR reactions using primers specific to the CKX genes targeted. The amplified products were subsequently sequenced and characterized to confirm the genetic changes. SEQ ID NOs:-114-284 provide examples of mutations achieved using the editing systems as described herein. Table 3 provides each of the example edits along with plant identification number (CEID), the edited locus, which corresponds to an edited CKX gene (Table 4), the start position of the deletion relevant to the wild-type genomic sequence and the deletion length.

[0314] First-generation edited events (E0) of interest were selfed and progeny (E1 generation) were selected from the segregating population. E1 plants comprising out-of-frame deletions in the coding region of the desired CKX genes were planted and grown and E2 seed was harvested. E2 seed was planted for phenotypic testing.

TABLE 1
Spacer sequences and targeted CKX genes in Soybeans

| CKX | Public gene ID | SEQ ID NO: | Spacer Name | Spacer seq |
|---|---|---|---|---|
| CKX1 | Glyma.15G170300 | PWg120386 | SEQ ID NO: | TCCTCCTGTTCATAACCATAACA |
| | | | 99 | |
| | | PWg120389 | SEQ ID NO: | TGACGACCCAGAGGCCCTCCAGG |
| | | | 100 | |
| | | PWg120425 | SEQ ID NO: | ACATACTTCATCCTCCTGTTCAT |
| | | | 101 | |
| CKX2 | Glyma.09G063900 | PWg120385 | SEQ ID NO: | TCCTCCTGCTCATAACCATAACA |
| | | | 102 | |
| | | PWg120388 | SEQ ID NO: | CAACGACCCAGAGGCCCTCCAGG |
| | | | 103 | |
| | | PWg120433 | SEQ ID NO: | GGAGGCGGCGTTAGGGCCTTCAT |
| | | | 104 | |
| CKX3 | Glyma.17G054500 | PWg120384 | SEQ ID NO: | TACTACTGCTAGTAACCATAACC |
| | | | 105 | |
| | | PWg120387 | SEQ ID NO: | TGATGACCCTGAAACCATTCAAA |
| | | | 106 | |
| | | PWg120432 | SEQ ID NO: | ACAGTGAATATCAAACGGGTTAT |
| | | | 107 | |
| CKX4 | Glyma.04g028900 | PWg120426 | SEQ ID NO: | TGGCTGTCAACAACAACAAGCTT |
| | | | 108 | |
| | | PWg120427 | SEQ ID NO: | CCGAAGCCGCCTCCAGTTCCAAC |
| | | | 109 | |
| CKX5 | Glyma.09g225400 | PWg120428 | SEQ ID NO: | TCAAAAGCTTCGCCTTCACGATA |
| | | | 110 | |
| | | PWg120429 | SEQ ID NO: | CTGAAATCAATTCCCCTTGAAGG |
| | | | 111 | |
| CKX6 | Glyma.09g063500 | PWg120430 | SEQ ID NO: | ACAACTATGGTTGTGCTATTGCT |
| | | | 112 | |
| | | PWg120431 | SEQ ID NO: | ACATGCCTCAACCGATTATGGGC |
| | | | 113 | |

TABLE 2
Constructs and Spacers used to target CKX genes in Soybean

| | | | Spacer SEQ ID | |
|---|---|---|---|---|
| Construct: | CKX | Public gene ID | No. | Spacer sequence |
| pWISE1092 | CKX1 | Glyma.15G170300 | SEQ ID NO: 99 | TCCTCCTGTTCATAACCATAACA |
| | | | SEQ ID NO: 100 | TGACGACCCAGAGGCCCTCCAGG |
| | CKX2 | Glyma.09G063900 | SEQ ID NO: 102 | TCCTCCTGCTCATAACCATAACA |
| | | | SEQ ID NO: 103 | CAACGACCCAGAGGCCCTCCAGG |
| | CKX3 | Glyma.17G054500 | SEQ ID NO: 105 | TACTACTGCTAGTAACCATAACC |
| | | | SEQ ID NO: 106 | TGATGACCCTGAAACCATTCAAA |
| pWISE1335 | CKX1 | Glyma.15G170300 | SEQ ID NO: 100 | TGACGACCCAGAGGCCCTCCAGG |
| | | | SEQ ID NO: 101 | ACATACTTCATCCTCCTGTTCA |
| | CKX3 | Glyma.17G054500 | SEQ ID NO: 106 | TGATGACCCTGAAACCATTCAAA |
| | | | SEQ ID NO: 107 | ACAGTGAATATCAAACGGGTTAT |
| | CKX5 | Glyma.09g225400 | SEQ ID NO: 110 | TCAAAAGCTTCGCCTTCACGATA |
| | | | SEQ ID NO: 111 | CTGAAATCAATTCCCCTTGAAGG |
| | CKX6 | Glyma.09g063500 | SEQ ID NO: 112 | ACAACTATGGTTGTGCTATTGCT |
| | | | SEQ ID NO: 113 | ACATGCCTCAACCGATTATGGGC |
| pWISE1336 | CKX1 | Glyma.15G170300 | SEQ ID NO: 99 | TCCTCCTGTTCATAACCATAACA |
| | | | SEQ ID NO: 100 | TGACGACCCAGAGGCCCTCCAGG |
| | CKX2 | Glyma.09G063900 | SEQ ID NO: 103 | CAACGACCCAGAGGCCCTCCAGG |
| | | | SEQ ID NO: 104 | GGAGGCGGCGTTAGGGCCTTCAT |
| | CKX3 | Glyma.17G054500 | SEQ ID NO: 105 | TACTACTGCTAGTAACCATAACC |
| | | | SEQ ID NO: 106 | TGATGACCCTGAAACCATTCAAA |
| | CKX4 | Glyma.04g028900 | SEQ ID NO: 109 | CCGAAGCCGCCTCCAGTTCCAAC |
| | | | SEQ ID NO: 108 | TGGCTGTCAACAACAACAAGCTT |

TABLE 3
Obtained Edits in CKX genes in Soybean

| Plant ID - LOCUS - Start Position: Deletion Size (D) | Construct | SEQ ID NO: |
|---|---|---|
| CE20753-LOCUS116-803: 26D | pWISE1092 | SEQ ID NO: 114 |
| CE20753-LOCUS115-2038: 2D | pWISE1092 | SEQ ID NO: 115 |
| CE20600-LOCUS116-708: 5D | pWISE1092 | SEQ ID NO: 116 |
| CE20600-LOCUS116-654: 56D, 815: 11D | pWISE1092 | SEQ ID NO: 117 |
| CE20600-LOCUS113-797: 142D | pWISE1092 | SEQ ID NO: 118 |
| CE48659-LOCUS116-710: 13D | pWISE1335 | SEQ ID NO: 119 |
| CE48659-LOCUS116-710: 8D | pWISE1335 | SEQ ID NO: 120 |
| CE48659-LOCUS115-1894: 9D, 2038: 4D | pWISE1335 | SEQ ID NO: 121 |
| CE48659-LOCUS114-785: 4D | pWISE1335 | SEQ ID NO: 122 |
| CE48637-LOCUS116-711: 5D | pWISE1335 | SEQ ID NO: 123 |
| CE48637-LOCUS116-703: 14D | pWISE1335 | SEQ ID NO: 124 |
| CE48637-LOCUS115-1898: 12D | pWISE1335 | SEQ ID NO: 125 |
| CE48637-LOCUS115-1897: 6D, 2036: 15D | pWISE1335 | SEQ ID NO: 126 |
| CE48637-LOCUS114-770: 21D | pWISE1335 | SEQ ID NO: 127 |
| CE48637-LOCUS114-691: 16D | pWISE1335 | SEQ ID NO: 128 |
| CE48637-LOCUS107-1566: 11D | pWISE1335 | SEQ ID NO: 129 |
| CE48618-LOCUS116-713: 3D | pWISE1335 | SEQ ID NO: 130 |
| CE48618-LOCUS116-707: 7D | pWISE1335 | SEQ ID NO: 131 |
| CE48618-LOCUS115-1899: 9D | pWISE1335 | SEQ ID NO: 132 |
| CE48618-LOCUS115-1897: 11D | pWISE1335 | SEQ ID NO: 133 |
| CE48618-LOCUS114-783: 8D | pWISE1335 | SEQ ID NO: 134 |
| CE48618-LOCUS114-700: 8D, 781: 9D | pWISE1335 | SEQ ID NO: 135 |
| CE48618-LOCUS107-1578: 131D | pWISE1335 | SEQ ID NO: 136 |
| CE48618-LOCUS107-1573: 15D | pWISE1335 | SEQ ID NO: 137 |
| CE48596-LOCUS116-705: 15D | pWISE1335 | SEQ ID NO: 138 |
| CE48596-LOCUS115-2038: 4D | pWISE1335 | SEQ ID NO: 139 |
| CE48596-LOCUS114-699: 10D | pWISE1335 | SEQ ID NO: 140 |
| CE48596-LOCUS114-699: 9D | pWISE1335 | SEQ ID NO: 141 |
| CE48596-LOCUS107-1698: 11D | pWISE1335 | SEQ ID NO: 142 |
| CE48280-LOCUS115-1897: 5D | pWISE1335 | SEQ ID NO: 143 |
| CE48280-LOCUS115-1889: 29D | pWISE1335 | SEQ ID NO: 144 |
| CE48280-LOCUS114-775: 77D | pWISE1335 | SEQ ID NO: 145 |
| CE48280-LOCUS107-1608: 202D | pWISE1335 | SEQ ID NO: 146 |
| CE48280-LOCUS107-1575: 6D | pWISE1335 | SEQ ID NO: 147 |
| CE48131-LOCUS116-806: 20D | pWISE1335 | SEQ ID NO: 148 |
| CE48131-LOCUS114-775: 15D | pWISE1335 | SEQ ID NO: 149 |
| CE48131-LOCUS114-698: 10D | pWISE1335 | SEQ ID NO: 150 |
| CE48116-LOCUS116-712: 6D | pWISE1335 | SEQ ID NO: 151 |
| CE48116-LOCUS116-703: 13D | pWISE1335 | SEQ ID NO: 152 |
| CE48116-LOCUS115-1899: 5D, 2038: 5D | pWISE1335 | SEQ ID NO: 153 |
| CE48116-LOCUS115-1897: 6D, 2038: 7D | pWISE1335 | SEQ ID NO: 154 |
| CE48116-LOCUS114-700: 11D, 764: 26D | pWISE1335 | SEQ ID NO: 155 |
| CE48116-LOCUS114-694: 14D, 772: 15D | pWISE1335 | SEQ ID NO: 156 |
| CE48116-LOCUS107-1576: 135D | pWISE1335 | SEQ ID NO: 157 |
| CE48116-LOCUS107-1553: 28D, 1697: 12D | pWISE1335 | SEQ ID NO: 158 |
| CE48108-LOCUS116-710: 6D | pWISE1335 | SEQ ID NO: 159 |
| CE48108-LOCUS116-702: 15D, 801: 28D | pWISE1335 | SEQ ID NO: 160 |
| CE48108-LOCUS115-1899: 9D | pWISE1335 | SEQ ID NO: 161 |
| CE48108-LOCUS114-699: 8D, 763: 60D | pWISE1335 | SEQ ID NO: 162 |
| CE48108-LOCUS107-1578: 3D, 1664: 65D | pWISE1335 | SEQ ID NO: 163 |
| CE48108-LOCUS107-1576: 14D, 1697: 15D | pWISE1335 | SEQ ID NO: 164 |
| CE48101-LOCUS116-713: 1D | pWISE1335 | SEQ ID NO: 165 |
| CE48101-LOCUS115-1897: 9D | pWISE1335 | SEQ ID NO: 166 |
| CE48101-LOCUS115-1825: 84D | pWISE1335 | SEQ ID NO: 167 |
| CE48101-LOCUS107-1607: 101D | pWISE1335 | SEQ ID NO: 168 |
| CE48036-LOCUS115-1899: 7D | pWISE1335 | SEQ ID NO: 169 |
| CE48036-LOCUS114-699: 13D | pWISE1335 | SEQ ID NO: 170 |
| CE31767-LOCUS116-709: 7D | pWISE1335 | SEQ ID NO: 171 |
| CE31767-LOCUS115-1900: 8D, 2024: 31D | pWISE1335 | SEQ ID NO: 172 |
| CE31767-LOCUS107-1578: 4D | pWISE1335 | SEQ ID NO: 173 |
| CE31743-LOCUS116-712: 7D | pWISE1335 | SEQ ID NO: 174 |
| CE31743-LOCUS116-712: 6D | pWISE1335 | SEQ ID NO: 175 |
| CE31743-LOCUS115-1899: 5D | pWISE1335 | SEQ ID NO: 176 |
| CE31743-LOCUS115-1887: 13D | pWISE1335 | SEQ ID NO: 177 |
| CE31743-LOCUS107-1577: 10D | pWISE1335 | SEQ ID NO: 178 |
| CE31693-LOCUS116-715: 1D | pWISE1335 | SEQ ID NO: 179 |
| CE31693-LOCUS116-707: 32D | pWISE1335 | SEQ ID NO: 180 |
| CE31693-LOCUS115-1899: 9D | pWISE1335 | SEQ ID NO: 181 |
| CE31693-LOCUS115-1899: 5D | pWISE1335 | SEQ ID NO: 182 |
| CE31693-LOCUS114-698: 29D | pWISE1335 | SEQ ID NO: 183 |
| CE31693-LOCUS107-1701: 3D | pWISE1335 | SEQ ID NO: 184 |
| CE31693-LOCUS107-1579: 130D | pWISE1335 | SEQ ID NO: 185 |
| CE31664-LOCUS116-711: 8D | pWISE1335 | SEQ ID NO: 186 |
| CE31664-LOCUS116-707: 16D | pWISE1335 | SEQ ID NO: 187 |
| CE31664-LOCUS115-1897: 6D, 2036: 10D | pWISE1335 | SEQ ID NO: 188 |
| CE31664-LOCUS114-700: 11D | pWISE1335 | SEQ ID NO: 189 |
| CE31638-LOCUS116-710: 12D | pWISE1335 | SEQ ID NO: 190 |
| CE31638-LOCUS116-708: 13D | pWISE1335 | SEQ ID NO: 191 |
| CE31638-LOCUS115-1899: 7D, 2037: 8D | pWISE1335 | SEQ ID NO: 192 |
| CE31638-LOCUS115-1892: 23D | pWISE1335 | SEQ ID NO: 193 |
| CE31638-LOCUS114-780: 4D | pWISE1335 | SEQ ID NO: 194 |
| CE31638-LOCUS107-1701: 10D | pWISE1335 | SEQ ID NO: 195 |
| CE31638-LOCUS107-1573: 15D | pWISE1335 | SEQ ID NO: 196 |
| CE31577-LOCUS115-1898: 12D | pWISE1335 | SEQ ID NO: 197 |
| CE31577-LOCUS114-698: 10D | pWISE1335 | SEQ ID NO: 198 |
| CE31532-LOCUS116-710: 75D, 822: 6D | pWISE1335 | SEQ ID NO: 199 |
| CE31532-LOCUS116-706: 16D | pWISE1335 | SEQ ID NO: 200 |
| CE31532-LOCUS115-1900: 9D | pWISE1335 | SEQ ID NO: 201 |
| CE31532-LOCUS107-1700: 6D | pWISE1335 | SEQ ID NO: 202 |
| CE31532-LOCUS107-1563: 11D | pWISE1335 | SEQ ID NO: 203 |
| CE31492-LOCUS116-712: 66D | pWISE1335 | SEQ ID NO: 204 |
| CE31492-LOCUS116-710: 11D | pWISE1335 | SEQ ID NO: 205 |
| CE31492-LOCUS115-1897: 11D | pWISE1335 | SEQ ID NO: 206 |
| CE31492-LOCUS107-1576: 134D | pWISE1335 | SEQ ID NO: 207 |
| CE31492-LOCUS107-1556: 153D | pWISE1335 | SEQ ID NO: 208 |
| CE28077-LOCUS115-1902: 3D | pWISE1335 | SEQ ID NO: 209 |
| CE28077-LOCUS115-1898: 11D | pWISE1335 | SEQ ID NO: 210 |
| CE28077-LOCUS107-1693: 16D | pWISE1335 | SEQ ID NO: 211 |
| CE28024-LOCUS107-1573: 11D | pWISE1335 | SEQ ID NO: 212 |
| CE27997-LOCUS115-1901: 5D | pWISE1335 | SEQ ID NO: 213 |
| CE27956-LOCUS115-1898: 11D | pWISE1335 | SEQ ID NO: 214 |
| CE27956-LOCUS115-1898: 7D | pWISE1335 | SEQ ID NO: 215 |
| CE27956-LOCUS114-700: 3D | pWISE1335 | SEQ ID NO: 216 |
| CE27956-LOCUS107-1686: 23D | pWISE1335 | SEQ ID NO: 217 |
| CE27929-LOCUS116-712: 8D | pWISE1335 | SEQ ID NO: 218 |
| CE27929-LOCUS116-708: 11D | pWISE1335 | SEQ ID NO: 219 |
| CE27929-LOCUS115-1898: 13D | pWISE1335 | SEQ ID NO: 220 |
| CE49952-LOCUS113-867: 1D | pWISE1336 | SEQ ID NO: 221 |
| CE49927-LOCUS116-703: 125D | pWISE1336 | SEQ ID NO: 222 |
| CE49927-LOCUS116-702: 19D, 819: 4D | pWISE1336 | SEQ ID NO: 223 |
| CE49927-LOCUS115-2045: 1D | pWISE1336 | SEQ ID NO: 224 |
| CE49927-LOCUS113-862: 8D | pWISE1336 | SEQ ID NO: 225 |
| CE49927-LOCUS113-859: 13D | pWISE1336 | SEQ ID NO: 226 |
| CE49927-LOCUS105-1554: 7D | pWISE1336 | SEQ ID NO: 227 |
| CE49900-LOCUS116-704: 6D | pWISE1336 | SEQ ID NO: 228 |
| CE49900-LOCUS113-860: 25D | pWISE1336 | SEQ ID NO: 229 |
| CE49900-LOCUS105-1539: 22D | pWISE1336 | SEQ ID NO: 230 |
| CE49820-LOCUS116-707: 7D | pWISE1336 | SEQ ID NO: 231 |
| CE49820-LOCUS116-704: 6D | pWISE1336 | SEQ ID NO: 232 |
| CE49820-LOCUS116-576: 3D, 596: 116D | pWISE1336 | SEQ ID NO: 233 |
| CE49820-LOCUS113-853: 18D | pWISE1336 | SEQ ID NO: 234 |
| CE49820-LOCUS105-1556: 5D | pWISE1336 | SEQ ID NO: 235 |
| CE49819-LOCUS115-1908: 5D, 2038: 4D | pWISE1336 | SEQ ID NO: 236 |
| CE49819-LOCUS115-1904: 6D, 2038: 4D | pWISE1336 | SEQ ID NO: 237 |
| CE49819-LOCUS113-859: 13D | pWISE1336 | SEQ ID NO: 238 |
| CE49819-LOCUS113-838: 39D | pWISE1336 | SEQ ID NO: 239 |
| CE49819-LOCUS105-1555: 5D | pWISE1336 | SEQ ID NO: 240 |
| CE49819-LOCUS105-1553: 8D | pWISE1336 | SEQ ID NO: 241 |
| CE49804-LOCUS116-703: 17D, 818: 10D | pWISE1336 | SEQ ID NO: 242 |
| CE49804-LOCUS116-703: 17D | pWISE1336 | SEQ ID NO: 243 |
| CE49804-LOCUS113-862: 9D | pWISE1336 | SEQ ID NO: 244 |
| CE49804-LOCUS113-854: 16D | pWISE1336 | SEQ ID NO: 245 |
| CE49804-LOCUS105-1554: 6D | pWISE1336 | SEQ ID NO: 246 |
| CE49804-LOCUS105-1550: 47D | pWISE1336 | SEQ ID NO: 247 |
| CE49799-LOCUS105-1553: 10D | pWISE1336 | SEQ ID NO: 248 |
| CE49760-LOCUS116-704: 18D, 819: 16D | pWISE1336 | SEQ ID NO: 249 |
| CE49760-LOCUS113-865: 9D | pWISE1336 | SEQ ID NO: 250 |
| CE49760-LOCUS105-1525: 39D | pWISE1336 | SEQ ID NO: 251 |
| CE29267-LOCUS116-816: 8D | pWISE1336 | SEQ ID NO: 252 |
| CE29267-LOCUS116-703: 14D | pWISE1336 | SEQ ID NO: 253 |
| CE29267-LOCUS105-1553: 9D | pWISE1336 | SEQ ID NO: 254 |
| CE29267-LOCUS105-1552: 10D | pWISE1336 | SEQ ID NO: 255 |
| CE29257-LOCUS116-706: 8D | pWISE1336 | SEQ ID NO: 256 |
| CE29257-LOCUS116-705: 122D | pWISE1336 | SEQ ID NO: 257 |
| CE29257-LOCUS113-860: 7D | pWISE1336 | SEQ ID NO: 258 |
| CE29257-LOCUS105-1660: 16D | pWISE1336 | SEQ ID NO: 259 |
| CE29257-LOCUS105-1552: 7D | pWISE1336 | SEQ ID NO: 260 |
| CE29233-LOCUS116-708: 5D | pWISE1336 | SEQ ID NO: 261 |
| CE29233-LOCUS116-702: 19D | pWISE1336 | SEQ ID NO: 262 |
| CE29233-LOCUS115-1904: 14D | pWISE1336 | SEQ ID NO: 263 |
| CE29233-LOCUS113-863: 9D | pWISE1336 | SEQ ID NO: 264 |
| CE29233-LOCUS113-859: 13D | pWISE1336 | SEQ ID NO: 265 |
| CE29233-LOCUS105-1553: 47D | pWISE1336 | SEQ ID NO: 266 |
| CE29233-LOCUS105-1546: 6D | pWISE1336 | SEQ ID NO: 267 |
| CE27443-LOCUS116-704: 10D | pWISE1336 | SEQ ID NO: 268 |
| CE27443-LOCUS113-857: 16D | pWISE1336 | SEQ ID NO: 269 |
| CE27326-LOCUS116-707: 8D | pWISE1336 | SEQ ID NO: 270 |
| CE27248-LOCUS116-704: 6D, 820: 5D | pWISE1336 | SEQ ID NO: 271 |
| CE27248-LOCUS116-703: 12D | pWISE1336 | SEQ ID NO: 272 |
| CE27248-LOCUS115-2038: 4D | pWISE1336 | SEQ ID NO: 273 |
| CE27248-LOCUS113-861: 10D | pWISE1336 | SEQ ID NO: 274 |
| CE27248-LOCUS105-1552: 9D | pWISE1336 | SEQ ID NO: 275 |
| CE27247-LOCUS116-702: 14D | pWISE1336 | SEQ ID NO: 276 |
| CE27247-LOCUS116-701: 21D | pWISE1336 | SEQ ID NO: 277 |
| CE27247-LOCUS113-860: 11D | pWISE1336 | SEQ ID NO: 278 |
| CE27247-LOCUS113-848: 17D | pWISE1336 | SEQ ID NO: 279 |
| CE27220-LOCUS116-705: 7D | pWISE1336 | SEQ ID NO: 280 |
| CE27220-LOCUS116-704: 6D | pWISE1336 | SEQ ID NO: 281 |
| CE27220-LOCUS105-1550: 13D | pWISE1336 | SEQ ID NO: 282 |
| CE27218-LOCUS116-704: 6D | pWISE1336 | SEQ ID NO: 283 |
| CE27218-LOCUS116-702: 12D | pWISE1336 | SEQ ID NO: 284 |

TABLE 4
LOCUS - CKX correlation

| LOCUS | CKX Gene | SEQ ID NO: (genomic) |
|---|---|---|
| 115 | 1 | 72 |
| 113 | 2 | 75 |
| 116 | 3 | 78 |
| 105 | 4 | 81 |
| 114 | 5 | 84 |
| 107 | 6 | 87 |

### Example 2. Phenotype Evaluation E0 Plant CE20600, CKX2 and CKX3 Knock-Out

[0315] The E0 plant CE20600 was selected for further phenotype evaluation. The E0 plant was self-pollinated to generate the E1 population and a single plant from the E1 population was allowed to self-pollinate to generate the E2 population. The CE20600 plant described in Example 1 has edits in the CKX genes (SEQ ID NO:116-118), which are expected to knock out the genes CKX2 (SEQ ID NO:75) and CKX3 (SEQ ID NO:78).

[0316] Phenotyping data was collected included count measurements per plant for node count (plant, mainstem and branches), branch count, seed count, plant height, and dry seed weight. From these averages, calculations for seed per pod, nodes per branch, pods per node (plant, mainstem, and branches), and 100 seed weight were generated. A statistically significant difference (p=0.06) at a 10% level was observed in the average number of seeds per pod when comparing CE20600 (E2 generation) with a transformation control such that the CE20600 plant contained a greater number of seeds per pod than the transformation control.

[0317] A highly statistically significant difference (p<0.05) in plant height was observed between CE20600 (E2 generation) and the transformation control such that the CE20600 plant was taller than the transformation control. The number of pods on the mainstem and the number of nodes on the mainstem were also statistically different between CE20600 and the transformation control, with the CE20600 plant showing an increase in the number of pods and in the number of nodes on the mainstem, the latter being expected due to the difference in plant height.

[0318] There was no strong statistical evidence of a difference in the number of seeds per plant, number of branches, number of nodes or the number of pods between CE20600 and the transformation control.

[0319] A highly statistically significant (p<0.05) difference in 100 seed weight between CE20600 (E2 generation) and the transformation control with the 100 seed weight of CE20600 being less than the 100 seed weight of the transformation control.

[0320] Taken together, this data suggests that the combination of knock-out of CKX2 and CKX3 may lead to a yield increase when CE20600 is grown in a field environment.

### Example 3: Greenhouse Phenotype Analysis of CE48101 and CE48659

[0321] The E0 plants CE48101 and CE48659 were selected for further phenotype evaluation and the E0 plant was self-pollinated to generate the E1 population. The CE48101 plant described in Example 1 has edits in CKX genes (SEQ ID NO:165-168), which are expected to knock out the genes CKX1 (SEQ ID NO:72), CKX3 (SEQ ID NO:78) and CKX6 (SEQ ID NO:87). The CE48659 plant described in Example 1 has edits in the CKX genes (SEQ ID NO:120-122) which are expected to knock out the genes CKX1 (SEQ ID NO:72), CKX3 (SEQ ID NO:78) and CKX5 (SEQ ID NO:84). The edited alleles of the CKX genes in both CE48101 and CE48659 were found to be segregating in the E1 generation such that various combinations of edits were identified.

[0322] The E1 generation was evaluated at 110 days after sowing for a variety of phenotypes and compared to transformation control plants and the data is summarized below in Table 5. In general, the CE48101, CE48659 and control plants have a lot of vegetative biomass (more than usual) and very few set pods.

TABLE 5

| | | | | | | | | Pods per | Pods |
|---|---|---|---|---|---|---|---|---|---|
| | | No. of | Stem | Nodes on | No. of | Pod on | Pods on | node on | per |
| Family | Genotype | plants | thickness | Mainstem | branches | branches | Mainstem | mainstem | plant |
| CE48101 | CKX1, | 7 | 19.01 | 21.86 | 15.14 | 15.00 | 12.43 | 0.56 | 27.43 |
| | CKX3, | | | | | | | | |
| | CKX6 | | | | | | | | |
| | CKX1, | 2 | 20.54 | 22.50 | 17.50 | 17.00 | 7.50 | 0.33 | 24.50 |
| | CKX6 | | | | | | | | |
| CE48659 | CKX1, | 4 | 18.77 | 19.75 | 14.25 | 9.50 | 9.25 | 0.46 | 18.75 |
| | CKX3 | | | | | | | | |
| | CKX1, | 6 | 19.78 | 19.33 | 15.17 | 11.83 | 5.83 | 0.30 | 17.67 |
| | CKX3, | | | | | | | | |
| | CKX5 | | | | | | | | |
| | CKX3, | 4 | 19.92 | 18.75 | 14.00 | 15.25 | 7.00 | 0.36 | 22.25 |
| | CKX5 | | | | | | | | |
| WT | WT | 8 | 19.09 | 21.63 | 14.88 | 17.25 | 13.13 | 0.59 | 30.38 |

A two-tailed T-test did not detect any significant differences between CE48101 and CE48659 when either is compared to the wild type control, except for the decrease in the number of nodes on the mainstem in the CE48659 (CKX1, 3; CKX1, 3, 5; and CKX3, 5) family.

### Example 4: Greenhouse Phenotype Analysis of CE28077, Knock-Out CKX1 and CKX6

[0323] The E0 plant CE28077 was selected for further phenotype evaluation and the E0 plant was self-pollinated to generate the E1 population. The CE28077 plant described in Example 1 has edits in the CKX genes (SEQ ID NO:209-211) which are expected to knock out the genes CKX1 (SEQ ID NO:72), and CKX6 (SEQ ID NO:87).

[0324] No statistically significant (p value=0.38) difference in the average number of seeds per pod was found between the transformation control and the CE28077. Also, no statistically significant increase was observed for any of the yield-based traits, including count measurements per plant for node count (plant, mainstem and branches), branch count, seed count, plant height, and dry seed weight. From these averages, calculations for seed per pod, nodes per branch, pods per node (plant, mainstem, and branches), and 100 seed weight between the transformation control and CE28077. However, there was an observational increase in CE28077 for the number of nodes on the plant, as well as the number of branches on the plant. These observations suggest that the knock-out allele combination of CKX1 and CKX6 may give rise to architectural changes that could increase overall yield which can be evaluated in a field planting setting rather than a greenhouse environment.

### Example 5: Greenhouse Phenotype Analysis of CE29267, CE27443, and CE29257

[0325] Phenotyping data was collected on the E2 population of CE29267, CE27443 and CE29257. The E2 population was produced by allowing the E0 generation to self-pollinate giving rise to the E1 population. A single plant from the E1 population was allowed to self-pollinate to give rise to the E2 population which was evaluated for phenotypes in the greenhouse. The CE29267 plant contains edited CKX genes (SEQ ID NO:253-255) such that the genes CKX3 (SEQ ID NO:78) and CKX4 (SEQ ID NO:81) are expected to be knocked out. The CE27443 plant contains edited CKX genes (SEQ ID NO:268-269) such that the genes CKX2 (SEQ ID NO:75) and CKX3 (SEQ ID NO:78) are expected to be knocked out. The CE29257 plant contains edited CKX genes (SEQ ID NO:256-260) such that the genes CKX2 (SEQ ID NO:75), CKX3 (SEQ ID NO:78) and CKX4 (SEQ ID NO:81) are expected to be knocked out.

[0326] Phenotypes were evaluated by comparing CE29267, CE27443 and CE29257 against a transformation control line. Count measurements were collected per plant for number of mainstem nodes, number of pods (plant, mainstem and branches), and number of seeds per plant. In addition, a quantitative measurement for plant height was taken. From this data, two additional phenotypic traits were calculated for analysis, the number of seed per pod and number of pods per node for the mainstem.

[0327] There was no statistically significant support (i.e., p<0.05) for a difference in overall plant yield or the average seeds per pod when comparing CE29267, CE27443 or CE29257 against a wildtype, non-edited, control.

[0328] There was a statistically significant (p-value=0.061) increase in the number of pods per node on the mainstem and total pods on the mainstem for CE29267 as compared to the transformation control; however, this increase did not transfer to the overall number of pods per plant. With respect to CE29267, there was strong statistically significant decrease in the pod count on branches as compared to the transformation control. As for the pods on the mainstem, this decrease could be attributed to the presence of tall plants in the CE29267 population. The reduction in the pods on branches for the CE29267 translated to an overall lower pod count for this line as compared to the transformation control.

[0329] No statistically significant increase was noted for the total pod count for any of the lines CE29267, CE27443 or CE29257 when compared to the transformation control. In addition, there was no statistically significant difference in plant height between for any of the lines CE29267, CE27443 or CE29257 and the transformation control; however, there was observational evidence in CE29267 (knockout of CKX3 and CKX4) may give rise to architectural changes in the plant habit that may lead to an increase in yield when the plants are grown in a field environment.

### Example 6: Greenhouse Phenotype Evaluation of Knock-Out Edits in CKX1, CKX3 and CKX6

[0330] Phenotyping data was collected on the E2 population of CE31532 and CE31492. The E2 population was produced by allowing the E0 plant to self-pollinate giving rise to the E1 population. A single plant from the E1 population was allowed to self-pollinate to give rise to the E2 population which was evaluated for phenotypes in the greenhouse. The CE31532 plant contains edited CKX genes SEQ ID NO:199-203, and the CE31492 plant contains edited CKX genes SEQ ID NO:204-208. The edited CKX genes in both CE31532 and CE31492 are expected to give rise to knock-outs of all three of CKX1 (SEQ ID NO:72), CKX3 (SEQ ID NO:78) and CKX6 (SEQ ID NO:87).

[0331] Phenotypes were evaluated by comparing CE31532 and CE31492 against a transformation control line. Count measurements were collected per plant for number of mainstem nodes, number of pods (plant, mainstem and branches), and number of seeds per plant. In addition, a quantitative measurement for plant height was taken. From this data, two additional phenotypic traits were calculated for analysis, the number of seed per pod and number of pods per node for the mainstem.

[0332] There was no statistically significant (p<0.05) difference in the average number of seeds per pod when comparing CE31532 or CE31492 to a wild type, non-edited, control. There was strong statistical support of a lower overall seeds per plant in CE31532 and CE31492 as compared to the wild type, non-edited control; however, this lower seed count was balanced by a statistically lower pod count as well.

[0333] The pod counts for the branches and the mainstem indicated a statistically significant (p-value >0.001) decrease in the number of pods on the branches in the CE31532 and CE31492 lines as compared to the control. This reduction in pods was not observed when comparing the number of pods on the mainstem. There was no statistically significant increase in the average pods per node on the mainstem.

[0334] A statistically significant difference was observed as an increase in the number of nodes on the mainstem for CE31532 (p-value=0.01) in relation to the unedited control. In parallel, it was observed that CE31532 had a statistically significant increase in height (p-value=0) which would account for the increase in the number of nodes.

[0335] The architectural changes observed suggest that the knock-out combination of CKX1, CKX3 and CKX6 may result in yield changes which can be measured in a field environment.

### Example 7: Greenhouse Phenotype Evaluation of Knock-Outs in CKX1, CKX3, CKX5 and CKX6

[0336] The plants CE48618, CE48108 and CE48637 were selected for further phenotype analysis. All three of these plants contain edited versions of all 4 genes CKX1 (SEQ ID NO:72), CKX3 (SEQ ID NO:78), CKX5 (SEQ ID NO:84) and CKX6 (SEQ ID NO:87) with these genes being expected to be knock-outs in these plants. The E0 plants CE48618, CE48108 and CE48637 were self-pollinated to generate the E1 population. As described in Example 1, the CE48618 plant has edited sequences SEQ ID NO:130-137, CE48108 has edited sequences SEQ ID NO:159-164 and CE48637 has edited sequences SEQ ID NO:123-129.

[0337] The E1 populations were grown in pots in the greenhouse and evaluated at the R6 stage, which is the stage of growth where the seeds have formed but are not yet drying down. The R6 stage is the green bean stage where the total pod weight peaks and seed growth is in a rapid phase. The leaves on the lowest nodes of the plant begin to yellow. This stage is approximately 110 days after sowing of the seed.

[0338] The numbers of plants per genotype were too low for statistical analysis; however, it was observed that there was a trend for a reduced number of branches in the CE48108 E1 plants, and an increase in the number of pods on mainstem as compared to the wildtype, non-edited control plants. No difference in the number of seeds per plant or in the number of seeds per pod was observed; however, it should be noted that the sample size was very small.

[0339] The architectural changes observed in CE48108 suggest that the knock-out of CKX1, CKX3, CKX5 and CKX6 may lead to an increase in yield when grown in a field environment.

### Example 8: Greenhouse Phenotype Analysis of CE20753

[0340] Phenotyping data was collected on the E2 population of CE20753. The E2 population was produced by allowing the E0 generation to self-pollinate giving rise to the E1 population. A single plant from the E1 population was allowed to self-pollinate to give rise to the E2 population which was evaluated for phenotypes in the greenhouse. As described in Example 1, CE20753 contains edited CKX genes (SEQ ID NO:114-115), which are expected to give rise to knock-outs of CKX1 (SEQ ID NO:72) and CKX3 (SEQ ID NO:78).

[0341] Phenotypes were evaluated by comparing CE20753 against a transformation control line. Count measurements were collected per plant for number of mainstem nodes, number of pods (plant, mainstem and branches), and number of seeds per plant. In addition, a quantitative measurement for plant height was taken. From this data, two additional phenotypic traits were calculated for analysis, the number of seed per pod and number of pods per node for the mainstem.

[0342] There was strong statistical support of lower values in CE20753 as compared to the transformation control line for the phenotype of average number of seeds per pod and the number of seeds per plant. With respect to pod count traits, there was no statistically significant difference in the total number of pods per plant, average number of pods per node on the mainstem, or number pods on the mainstem for CE20753 as compared to the transformation control. No statistically significant difference was observed for the count of pods on branches or for plant height between CE20753 edited progeny and the transformation control.

### Example 9: Greenhouse Phenotype Analysis CE29233

[0343] Phenotyping data was collected on the E2 population of CE29233. The E2 population was produced by allowing the E0 generation to self-pollinate giving rise to the E1 population. A single plant from the E1 population was allowed to self-pollinate to give rise to the E2 population which was evaluated for phenotypes in the greenhouse. As described in Example 1, CE29233 contains edited CKX genes (SEQ ID NO:261-267) which are expected to give rise to knock-outs of CKX1 (SEQ ID NO:72), CKX3 (SEQ ID NO:78), CKX2 (SEQ ID NO:75) and CKX4 (SEQ ID NO:81). The edited alleles of the CKX genes in CE29233 were found to be segregating in the E1 generation such that various combinations of edits were identified in the E2 population evaluated.

[0344] Phenotypes were evaluated by comparing CE29233 against a transformation control line. Count measurements were collected per plant for number of mainstem nodes, number of pods (plant, mainstem and branches), and number of seeds per plant. In addition, a quantitative measurement for plant height was taken. From this data, two additional phenotypic traits were calculated for analysis, the number of seed per pod and number of pods per node for the mainstem.

[0345] A statistically significant increase was observed in the average number of pods per node on the mainstem, number of pods on the mainstem and number of nodes on the mainstem of the CE29233 plants with edits in the CXK2 and CKX4 genes when compared to the transformation control line. This was determined by comparing with the transformation control and the difference for these phenotypes was significant to the 0.05 level (p-values <=0.01).

[0346] There was limited evidence of a reduction in the number of pods on branches for CE29233 plants with edits in CXK2 and CKX4 (p-value=0.094).

[0347] In the CE29233 plants with edits in the CKX1, CKX2 and CKX4 genes, there was evidence for an increase in number of nodes on the mainstem (p-value 0.00). However, there was strong evidence that these plants exhibited a decrease in the average number of seeds per pod, number of seed per plant and number of pods on branches (p-values=0.00).

[0348] We did find evidence that the CE29233 plants with edits in CXK2 and CKX4 deletion showed an increase in the number of pods and nodes on the mainstem with limited evidence of a decrease in the number of pods on branches. However, there was no associated significant difference in the number of seeds on the plant.

[0349] We also found evidence that the CE29233 plants with edits in the CKX1, CKX2 and CKX4 genes had an increase in the number of nodes on the mainstem along with a decrease in the number of pods on branches.

### Example 10: Greenhouse Phenotype Analysis CE31638

[0350] Phenotyping data was collected on the E2 population of CE31638. The E2 population was produced by allowing the E0 generation to self-pollinate giving rise to the E1 population. A single plant from the E1 population was allowed to self-pollinate to give rise to the E2 population which was evaluated for phenotypes in the greenhouse. As described in Example 1, CE31638 contains edited CKX genes (SEQ ID NO:190-196) which are expected to give rise to knock-outs of CKX1 (SEQ ID NO:72), CKX3 (SEQ ID NO:78), CKX5 (SEQ ID NO:84) and CKX6 (SEQ ID NO:87). The edited alleles of the CKX genes in CE31638 segregated in the E1 generation and various combinations of these edited alleles were identified in the E2 population.

[0351] Phenotypes were evaluated by comparing CE31638 against a transformation control line. Count measurements were collected per plant for number of mainstem nodes, number of pods (plant, mainstem and branches), and number of seeds per plant. In addition, a quantitative measurement for plant height was taken. From this data, two additional phenotypic traits were calculated for analysis, the number of seed per pod and number of pods per node for the mainstem.

[0352] When comparing the various CKX knock-out allele combinations in CE31638 with the wild type, non-edited control, there was no statistically significant evidence of an increase in any of the traits at the p<0.05 level. There is very limited evidence for an increase in the average number of pods per node on the mainstem for the CKX1, CKX3, CKX5 and CKX6 knock-out combination (p-value 0.156). There was evidence of a reduction in the number of pods on branches and the number of pods per plant for the knock-out combination of CKX1, CKX5 and CKX6 (p-value=0.019 and 0.021 respectively).

[0353] There is observational evidence that the knock-out combination of CKX1, CKX3, CKX5 and CKX6 may alter the average number of pods per node on the mainstem and there may also be an upward trend for the number of seeds per plant when compared to the wild type, non-edited, control. In addition, both of the genotypes (e.g., knock-out of CKX1, CKX3, CKX5, CKX6, and knock-out of CKX1, CKX5 and CKX6) trended above the wild type, non-edited, control for the average number of pods per node on the mainstem and number of pods on the mainstem. Taken together, this data suggests that both of the CKX1, CKX3, CKX5 and CKX6; and CKX1, CKX5 and CKX6 knock-outs could increase plant yield when the plants are grown in a field environment.

### Example 11. Greenhouse Nursery Phenotype Evaluation

[0354] Selected E2 seed families were placed into greenhouse nurseries to increase seeds of a set of cytokinin oxidase gene editing events. To take advantage of nursery grow-out, phenotypic observations of these plants were made on a single plant basis. The E2 seed families that were evaluated are listed below in Table 5.

[0355] Within each family, the phenotypic changes observed to be most consistent among different plants of the event included plant height change, enhancement of pod setting, reduction of internode length, changes on branching number and position and delayed leaf senescence. In addition, there were a few additional phenotypic changes observed when comparing the individual E2 families, including the number of leaflet(s) and the number of seeds per pod.

[0356] Overall, these phenotypic observations were made at the single plant level. More than half of the E2 seed families produced similar or a higher number of seeds than that of the control plants. However, due to some of nursery practices such as no randomization of the nursery planting design, topping some plants that were too high and variation of growth conditions, the seed number data listed in Table 5 is just for monitoring off-types, not for quantification or comparison. The E2 families CE43708, CE55653 and CE59145 did show an average of a 5% increase in seed number when compared to non-edited/control plants in the same environment.

TABLE 5
E2 seed families

| | | Average | |
|---|---|---|---|
| Construct # | E2 Family name | seed#/plant | Plant # |
| Control | | 781 | 6 |
| PWISE1092 | CE43708 | 956 | 6 |
| PWISE1336 | CE55549 | 587 | 6 |
| PWISE1336 | CE55634 | 572 | 5 |
| PWISE1336 | CE55653 | 820 | 6 |
| PWISE1336 | CE55653 | 555 | 5 |
| PWISE1336 | CE55704 | 559 | 6 |
| PWISE1336 | CE55799 | 645 | 5 |
| PWISE1336 | CE59145 | 896 | 6 |
| PWISE1336 | CE64036 | 800 | 5 |
| PWISE1335 | CE48974 | 496 | 6 |
| PWISE1335 | CE49021 | 783 | 5 |
| PWISE1335 | CE73381 | 732 | 6 |
| PWISE1335 | CE76573 | 764 | 5 |
| PWISE1335 | CE76674 | 791 | 5 |
| PWISE1335 | CE76755 | 724 | 6 |

[0357] The foregoing is illustrative of the present invention and is not to be construed as limiting thereof. The invention is defined by the following claims, with equivalents of the claims to be included therein.

1. A plant or plant part thereof comprising at least one non-natural mutation in at least one endogenous Cytokinin Oxidase/Dehydrogenase (CKX) gene encoding a CKX protein.

2-6. (canceled)

7. The plant or part thereof of claim 1, wherein the at least one non-natural mutation results in a truncated CKX protein.

8. The plant or part thereof of claim 1, wherein the at least one non-natural mutation results in a 3′ end truncation of the CKX gene, which produces a truncated CKX protein or no protein.

9. (canceled)

10. The plant or part thereof of claim 1, wherein the endogenous CKX gene is an endogenous CKX1 gene, which encodes a CKX1 protein, an endogenous CKX2 gene, which encodes a CKX2 protein, an endogenous CKX3 gene, which encodes a CKX3 protein, an endogenous CKX4 gene, which encodes a CKX4 protein, an endogenous CKX5 gene, which encodes a CKX5 protein, or an endogenous CKX6 gene, which encodes a CKX6 protein, or any combination thereof.

11. The plant or part thereof of claim 10, wherein the at least one non-natural mutation is a mutation in at least two of the endogenous CKX genes of CKX1, CKX2, CKX3, CKX4, CKX5 and/or CKX6 gene, in any combination.

12. The plant or part thereof of claim 10, wherein the at least one non-natural mutation is a mutation in at least three of the endogenous CKX genes of CKX1, CKX2, CKX3, CKX4, CKX5 or CKX6 gene, in any combination.

13. (canceled)

14. The plant or part thereof of claim 1,
wherein the endogenous CKX gene is
a CKX1 gene that (a) comprises a sequence having at least 80% sequence identity to the nucleotide sequence of SEQ ID NO:72 or SEQ ID NO:73; (b) comprises a region having at least 80% sequence identity to any one of the nucleotide sequences of SEQ ID NO:93; and/or (c) encodes a polypeptide comprising a sequence having at least 80% sequence identity to the amino acid sequence of SEQ ID NO:74;
a CKX2 gene that (a) comprises a sequence having at least 80% sequence identity to the nucleotide sequence of SEQ ID NO:75 or SEQ ID NO:76; (b) comprises a region having at least 80% sequence identity to the nucleotide sequence of SEQ ID NO:94; and/or (c) encodes a polypeptide comprising a sequence having at least 80% sequence identity to the amino acid sequence of SEQ ID NO:77;
a CKX3 gene that (a) comprises a sequence having at least 80% sequence identity to the nucleotide sequence of SEQ ID NO:78 or SEQ ID NO:79; (b) comprises a region having at least 80% sequence identity to the nucleotide sequence of SEQ ID NO:95; and/or (c) encodes a polypeptide comprising a sequence having at least 80% sequence identity to the amino acid sequence of SEQ ID NO:80;
a CKX4 gene that (a) comprises a sequence having at least 80% sequence identity to the nucleotide sequence of SEQ ID NO:81 or SEQ ID NO:82; (b) comprises a region having at least 80% sequence identity to the nucleotide sequence of SEQ ID NO:96; and/or (c) encodes a polypeptide comprising a sequence having at least 80% sequence identity to the amino acid sequence of SEQ ID NO:83;
a CKX5 gene that (a) comprises a sequence having at least 80% sequence identity to the nucleotide sequence of SEQ ID NO:84 or SEQ ID NO:91; (b) comprises a region having at least 80% sequence identity to the nucleotide sequence of SEQ ID NO:97; and/or (c) encodes a polypeptide comprising a sequence having at least 80% sequence identity to the amino acid sequence of SEQ ID NO:92; and/or
a CKX6 gene that (a) comprises a sequence having at least 80% sequence identity to the nucleotide sequence of SEQ ID NO:87 or SEQ ID NO:88; (b) comprises a region having at least 80% sequence identity to the nucleotide sequence of SEQ ID NO:98; and/or (c) encodes a polypeptide comprising a sequence having at least 80% sequence identity to the amino acid sequence of SEQ ID NO:89.

15-18. (canceled)

19. The plant or part thereof of claim 1, wherein the plant is soybean.

20. A plant cell, comprising an editing system comprising:
(a) a CRISPR-associated effector protein; and
(b) a guide nucleic acid (gRNA, gDNA, crRNA, crDNA, sgRNA, sgDNA) comprising a spacer sequence with complementarity to an endogenous target gene encoding a CKX protein in the plant cell.

21-23. (canceled)

24. The plant cell of claim 1, wherein the endogenous target gene comprises a sequence having at least 80% sequence identity to any one of the nucleotide sequences of SEQ ID NOs: 72, 73, 75, 76, 78, 79, 81, 82, 84, 87, 88, or 91, and/or comprises a region having at least 80% sequence identity to any one of the nucleotide sequences of SEQ ID NOs:93-98.

25. The plant cell of claim 1, wherein the CKX protein comprises at least 80% sequence identity to any one of the amino acid sequences SEQ ID NOs:74, 77, 80, 83, 89, or 92.

26. The plant cell of claim 1, wherein the guide nucleic acid comprises any one of the nucleotide sequences of SEQ ID NOs:99-113.

27. A plant regenerated from the plant part of claim 1.

28. The plant of claim 27, wherein the plant comprises one or more mutated CKX genes comprising a nucleotide sequence having at least 90% sequence identity to any one of SEQ ID NOs:114-284, or an combination thereof.

29. (canceled)

30. A plant cell comprising at least one non-natural mutation within an endogenous Cytokinin Oxidase/Dehydrogenase (CKX) gene that results in a null allele or knockout of the CKX gene, wherein the at least one non-natural mutation is a base substitution, base insertion or a base deletion that is introduced using an editing system that comprises a nucleic acid binding domain that binds to a target site in the CKX gene.

31. The plant cell of claim 30, wherein the endogenous CKX gene is a CKX1 gene, a CKX2 gene, a CKX3 gene, a CKX4 gene, a CKX5 gene, and/or a CKX6 gene, or any combination thereof.

32-33. (canceled)

34. The plant cell of claim 30, wherein the endogenous CKX gene comprises a sequence having at least 80% sequence identity to any one of the nucleotide sequences of SEQ ID NOs:72, 73, 75, 76, 78, 79, 81, 82, 84, 87, 88, or 91, comprises a region having at least 80% sequence identity to any one of the nucleotide sequences of SEQ ID NOs:93-98 and/or encodes a polypeptide having at least 80% identity to any one of the amino acid sequences of SEQ ID NOs: 74, 77, 80, 83, 89, or 92.

35. The plant cell of claim 30, wherein the target site is within a region of the CKX gene, the region comprising a sequence having at least 80% sequence identity to a sequence comprising:
(a) about nucleotide 1884 to about nucleotide 2060 of the nucleotide sequence of SEQ ID NO:72 (CKX1) or about nucleotide 28 to about nucleotide 204 of the nucleotide sequence of SEQ ID NO:73 (CKX1) (e.g., SEQ ID NO:93);
(b) about nucleotide 803 to about nucleotide 955 of the nucleotide sequence of SEQ ID NO:75 (CKX2) or about nucleotide 38 to about nucleotide 190 of the nucleotide sequence of SEQ ID NO:76 (CKX2) (e.g., SEQ ID NO:94);
(c) about nucleotide 692 to about nucleotide 826 of the nucleotide sequence of SEQ ID NO:78 (CKX3) or about nucleotide 35 to about nucleotide 169 of the nucleotide sequence of SEQ ID NO:79 (CKX3) (e.g., SEQ ID NO:95);
(d) about nucleotide 1540 to about nucleotide 1689 of the nucleotide sequence of SEQ ID NO:81 (CKX4) or about nucleotide 2 to about nucleotide 151 of the nucleotide sequence of SEQ ID NO:82 (CKX4) (e.g., SEQ ID NO:95);
(e) about nucleotide 690 to about nucleotide 790 of the nucleotide sequence of SEQ ID NO:84 (CKX5), or about nucleotide 43 to about nucleotide 143 of the nucleotide sequence of SEQ ID NO:91 (CKX5) (e.g., SEQ ID NO:97); and/or
(f) about nucleotide 1562 to about nucleotide 1709 of the nucleotide sequence of SEQ ID NO:87 (CKX6) or about nucleotide 31 to about nucleotide 178 (CKX6) of the nucleotide sequence of SEQ ID NO:88 (CKX6) (e.g., SEQ ID NO:98).

36. The plant cell of claim 30, wherein the editing system further comprises a nuclease, and the nucleic acid binding domain binds to a target site in the CKX gene, wherein the CKX gene comprises a sequence having at least 80% sequence identity to any one of the nucleotide sequences of SEQ ID NOs:72, 73, 75, 76, 78, 79, 81, 82, 84, 87, 88, or 91, comprises a region having at least 80% sequence identity to any one of the nucleotide sequences of SEQ ID NOs:93-98, and/or encodes a polypeptide having at least 80% identity to any one of the amino acid sequences of SEQ ID NOs: 74, 77, 80, 83, 89, or 92, and the at least one non-natural mutation is made following cleavage by the nuclease.

37. The plant cell of claim 36, wherein the target site comprises a sequence having at least 80% sequence identity to any one of the nucleotide sequences of SEQ ID NOs:93-98.

38-116. (canceled)

The application's sequence listing, which the Patent Office published only in electronic form, follows.

SEQUENCE LISTING (284 sequences)

SEQ ID NO: 1 - protein, 1228 aa, Unknown
  Lachnospiraceae sp.
MSKLEKFTNCYSLSKTLRFKAIPVGKTQENIDNKRLLVEDEKRAEDYKGVKKLLDRYYLSFINDVLHSIKLKNLNNYISLFRKKTRTEKENKELENLEINLRKEIAKAFKGNEGYKSLFKKDIIETILPEFLDDKDEIALVNSFNGFTTAFTGFFDNRENMFSEEAKSTSIAFRCINENLTRYISNMDIFEKVDAIFDKHEVQEIKEKILNSDYDVEDFFEGEFFNFVLTQEGIDVYNAIIGGFVTESGEKIKGLNEYINLYNQKTKQKLPKFKPLYKQVLSDRESLSFYGEGYTSDEEVLEVFRNTLNKNSEIFSSIKKLEKLFKNFDEYSSAGIFVKNGPAISTISKDIFGEWNVIRDKWNAEYDDIHLKKKAVVTEKYEDDRRKSFKKIGSFSLEQLQEYADADLSVVEKLKEIIIQKVDEIYKVYGSSEKLFDADFVLEKSLKKNDAVVAIMKDLLDSVKSFENYIKAFFGEGKETNRDESFYGDFVLAYDILLKVDHIYDAIRNYVTQKPYSKDKFKLYFQNPQFMGGWDKDKETDYRATILRYGSKYYLAIMDKKYAKCLQKIDKDDVNGNYEKINYKLLPGPNKMLPKVFFSKKWMAYYNPSEDIQKIYKNGTFKKGDMFNLNDCHKLIDFFKDSISRYPKWSNAYDFNFSETEKYKDIAGFYREVEEQGYKVSFESASKKEVDKLVEEGKLYMFQIYNKDFSDKSHGTPNLHTMYFKLLFDENNHGQIRLSGGAELFMRRASLKKEELVVHPANSPIANKNPDNPKKTTTLSYDVYKDKRFSEDQYELHIPIAINKCPKNIFKINTEVRVLLKHDDNPYVIGIDRGERNLLYIVVVDGKGNIVEQYSLNEIINNFNGIRIKTDYHSLLDKKEKERFEARQNWTSIENIKELKAGYISQVVHKICELVEKYDAVIALEDLNSGFKNSRVKVEKQVYQKFEKMLIDKLNYMVDKKSNPCATGGALKGYQITNKFESFKSMSTQNGFIFYIPAWLTSKIDPSTGFVNLLKTKYTSIADSKKFISSFDRIMYVPEEDLFEFALDYKNFSRTDADYIKKWKLYSYGNRIRIFRNPKKNNVFDWEEVCLTSAYKELFNKYGINYQQGDIRALLCEQSDKAFYSSFMALMSLMLQMRNSITGRTDVDFLISPVKNSDGIFYDSRNYEAQENAILPKNADANGAYNIARKVLWAIGQFKKAEDEKLDKVKIAISNKEWLEYAQTSVKH

SEQ ID NO: 2 - protein, 1307 aa, Acidaminococcus sp.
MTQFEGFTNLYQVSKTLRFELIPQGKTLKHIQEQGFIEEDKARNDHYKELKPIIDRIYKTYADQCLQLVQLDWENLSAAIDSYRKEKTEETRNALIEEQATYRNAIHDYFIGRTDNLTDAINKRHAEIYKGLFKAELFNGKVLKQLGTVTTTEHENALLRSFDKFTTYFSGFYENRKNVFSAEDISTAIPHRIVQDNFPKFKENCHIFTRLITAVPSLREHFENVKKAIGIFVSTSIEEVFSFPFYNQLLTQTQIDLYNQLLGGISREAGTEKIKGLNEVLNLAIQKNDETAHIIASLPHRFIPLFKQILSDRNTLSFILEEFKSDEEVIQSFCKYKTLLRNENVLETAEALFNELNSIDLTHIFISHKKLETISSALCDHWDTLRNALYERRISELTGKITKSAKEKVQRSLKHEDINLQEIISAAGKELSEAFKQKTSEILSHAHAALDQPLPTTLKKQEEKEILKSQLDSLLGLYHLLDWFAVDESNEVDPEFSARLTGIKLEMEPSLSFYNKARNYATKKPYSVEKFKLNFQMPTLASGWDVNKEKNNGAILFVKNGLYYLGIMPKQKGRYKALSFEPTEKTSEGFDKMYYDYFPDAAKMIPKCSTQLKAVTAHFQTHTTPILLSNNFIEPLEITKEIYDLNNPEKEPKKFQTAYAKKTGDQKGYREALCKWIDFTRDFLSKYTKTTSIDLSSLRPSSQYKDLGEYYAELNPLLYHISFQRIAEKEIMDAVETGKLYLFQIYNKDFAKGHHGKPNLHTLYWTGLFSPENLAKTSIKLNGQAELFYRPKSRMKRMAHRLGEKMLNKKLKDQKTPIPDTLYQELYDYVNHRLSHDLSDEARALLPNVITKEVSHEIIKDRRFTSDKFFFHVPITLNYQAANSPSKFNQRVNAYLKEHPETPIIGIDRGERNLIYITVIDSTGKILEQRSLNTIQQFDYQKKLDNREKERVAARQAWSVVGTIKDLKQGYLSQVIHEIVDLMIHYQAVVVLENLNFGFKSKRTGIAEKAVYQQFEKMLIDKLNCLVLKDYPAEKVGGVLNPYQLTDQFTSFAKMGTQSGFLFYVPAPYTSKIDPLTGFVDPFVWKTIKNHESRKHFLEGFDFLHYDVKTGDFILHFKMNRNLSFQRGLPGFMPAWDIVFEKNETQFDAKGTPFIAGKRIVPVIENHRFTGRYRDLYPANELIALLEEKGIVFRDGSNILPKLLENDDSHAIDTMVALIRSVLQMRNSNAATGEDYINSPVRDLNGVCFDSRFQNPEWPMDADANGAYHIALKGQLLLNHLKESKDLKLQNGISNQDWLAYIQELRN

SEQ ID NO: 3 - protein, 1241 aa, Butyrivibrio proteoclasticus
MLLYENYTKRNQITKSLRLELRPQGKTLRNIKELNLLEQDKAIYALLERLKPVIDEGIKDIARDTLKNCELSFEKLYEHFLSGDKKAYAKESERLKKEIVKTLIKNLPEGIGKISEINSAKYLNGVLYDFIDKTHKDSEEKQNILSDILETKGYLALFSKFLTSRITTLEQSMPKRVIENFEIYAANIPKMQDALERGAVSFAIEYESICSVDYYNQILSQEDIDSYNRLISGIMDEDGAKEKGINQTISEKNIKIKSEHLEEKPFRILKQLHKQILEEREKAFTIDHIDSDEEVVQVTKEAFEQTKEQWENIKKINGFYAKDPGDITLFIVVGPNQTHVLSQLIYGEHDRIRLLLEEYEKNTLEVLPRRTKSEDARYDKFVNAVPKKVAKESHTFDGLQKMTGDDRLFILYRDELARNYMRIKEAYGTFERDILKSRRGIKGNRDVQESLVSFYDELTKFRSALRIINSGNDEKADPIFYNTFDGIFEKANRTYKAENLCRNYVTKSPADDARIMASCLGTPARLRTHWWNGEENFAINDVAMIRRGDEYYYFVLTPDVKPVDLKTKDETDAQIFVQRKGAKSFLGLPKALFKCILEPYFESPEHKNDKNCVIEEYVSKPLTIDRRAYDIFKNGTFKKTNIGIDGLTEEKFKDDCRYLIDVYKEFIAVYTRYSCFNMSGLKRADEYNDIGEFFSDVDTRLCTMEWIPVSFERINDMVDKKEGLLFLVRSMFLYNRPRKPYERTFIQLFSDSNMEHTSMLLNSRAMIQYRAASLPRRVTHKKGSILVALRDSNGEHIPMHIREAIYKMKNNFDISSEDFIMAKAYLAEHDVAIKKANEDIIRNRRYTEDKFFLSLSYTKNADISARTLDYINDKVEEDTQDSRMAVIVTRNLKDLTYVAVVDEKNNVLEEKSLNEIDGVNYRELLKERTKIKYHDKTRLWQYDVSSKGLKEAYVELAVTQISKLATKYNAVVVVESMSSTFKDKFSFLDEQIFKAFEARLCARMSDLSFNTIKEGEAGSISNPIQVSNNNGNSYQDGVIYFLNNAYTRTLCPDTGFVDVFDKTRLITMQSKRQFFAKMKDIRIDDGEMLFTFNLEEYPTKRLLDRKEWTVKIAGDGSYFDKDKGEYVYVNDIVREQIIPALLEDKAVFDGNMAEKFLDKTAISGKSVELIYKWFANALYGIITKKDGEKIYRSPITGTEIDVSKNTTYNFGKKFMFKQEYRGDGDFLDAFLNYMQAQDIAV

SEQ ID NO: 4 - protein, 1238 aa, Candidatus Methanoplasma termitum
MNNYDEFTKLYPIQKTIRFELKPQGRTMEHLETFNFFEEDRDRAEKYKILKEAIDEYHKKFIDEHLTNMSLDWNSLKQISEKYYKSREEKDKKVFLSEQKRMRQEIVSEFKKDDRFKDLFSKKLFSELLKEEIYKKGNHQEIDALKSFDKFSGYFIGLHENRKNMYSDGDEITAISNRIVNENFPKFLDNLQKYQEARKKYPEWIIKAESALVAHNIKMDIVFSLEYFNKVLNQEGIQRYNLALGGYVTKSGEKMMGLNDALNLAHQSEKSSKGRIHMTPLFKQILSEKESFSYIPDVFTEDSQLLPSIGGFFAQIENDKDGNIFDRALELISSYAEYDTERIYIRQADINRVSNVIFGEWGTLGGLMREYKADSINDINLERTCKKVDKWLDSKEFALSDVLEAIDRTGNNDAFNEYISKMRTAREKIDAARKEMKFISEKISGDEESIHIIKTLLDSVQQFLHFFNLFKARQDIPLDGAFYAEFDEVHSKLFAIVPLYNKVRNYLTKNNLNTKKIKLNFKNPTLANGWDQNKVYDYASLIFLRDGNYYLGIINPKRKKNIKFEQGSGNGPFYRKMVYKQIPGPNKNLRPVFLTSTKGKKEYKPSKEIIEGYEADKHIRGDKFDLDFCHKLIDFFKESIEKHKDWSKFNFYFSPTESYGDISEFYLDVEKQGYRMHFENISAETIDEYVEKGDLFLFQIYNKDFVKAATGKKDMHTIYWNAAFSPENLQDVVVKLNGEAELFYRDKSDIKEIVHREGEILVNRTYNGRTPVPDKIHKKLTDYHNGRTKDLGEAKEYLDKVRYFKAHYDITKDRRYLNDKIYFHVPLTLNFKANGKKNLNKMVIEKFLSDEKAHIIGIDRGERNLLYYSIIDRSGKIIDQQSLNVIDGFDYREKLNQREIEMKDARQSWNAIGKIKDLKEGYLSKAVHEITKMAIQYNAIVVMEELNYGFKRGRFKVEKQIYQKFENMLIDKMNYLVFKDAPDESPGGVLNAYQLTNPLESFAKLGKQTGILFYVPAAYTSKIDPTTGFVNLFNTSSKTNAQERKEFLQKFESISYSAKDGGIFAFAFDYRKFGTSKTDHKNVWTAYTNGERMRYIKEKKRNELFDPSKEIKEALTSSGIKYDGGQNILPDILRSNNNGLIYTMYSSFIAAIQMRVYDGKEDYIISPIKNSKGEFFRTDPKRRELPIDADANGAYNIALRGELTMRAIAEKFDPDSEKMAKLELKHKDWFEFMQTRGD

SEQ ID NO: 5 - protein, 1281 aa, Eubacterium eligens
MNGNRSIVYREFVGVIPVAKTLRNELRPVGHTQEHIIQNGLIQEDELRQEKSTELKNIMDDYYREYIDKSLSGVTDLDFTLLFELMNLVQSSPSKDNKKALEKEQSKMREQICTHLQSDSNYKNIFNAKLLKEILPDFIKNYNQYDVKDKAGKLETLALFNGFSTYFTDFFEKRKNVFTKEAVSTSIAYRIVHENSLIFLANMTSYKKISEKALDEIEVIEKNNQDKMGDWELNQIFNPDFYNMVLIQSGIDFYNEICGVVNAHMNLYCQQTKNNYNLFKMRKLHKQILAYTSTSFEVPKMFEDDMSVYNAVNAFIDETEKGNIIGKLKDIVNKYDELDEKRIYISKDFYETLSCFMSGNWNLITGCVENFYDENIHAKGKSKEEKVKKAVKEDKYKSINDVNDLVEKYIDEKERNEFKNSNAKQYIREISNIITDTETAHLEYDDHISLIESEEKADEMKKRLDMYMNMYHWAKAFIVDEVLDRDEMFYSDIDDIYNILENIVPLYNRVRNYVTQKPYNSKKIKLNFQSPTLANGWSQSKEFDNNAIILIRDNKYYLAIFNAKNKPDKKIIQGNSDKKNDNDYKKMVYNLLPGANKMLPKVFLSKKGIETFKPSDYIISGYNAHKHIKTSENFDISFCRDLIDYFKNSIEKHAEWRKYEFKFSATDSYSDISEFYREVEMQGYRIDWTYISEADINKLDEEGKIYLFQIYNKDFAENSTGKENLHTMYFKNIFSEENLDKIIKLNGQAELFYRRASVKNPVKHKKDSVLVNKTYKNQLDNGDVVRIPIPDDIYNEIYKMYNGYIKESDLSEAAKEYLDKVEVRTAQKDIVKDYRYTVDKYFIHTPITINYKVTARNNVNDMVVKYIAQNDDIHVIGIDRGERNLIYISVIDSHGNIVKQKSYNILNNYDYKKKLVEKEKTREYARKNWKSIGNIKELKEGYISGVVHEIAMLIVEYNAIIAMEDLNYGFKRGRFKVERQVYQKFESMLINKLNYFASKEKSVDEPGGLLKGYQLTYVPDNIKNLGKQCGVIFYVPAAFTSKIDPSTGFISAFNFKSISTNASRKQFFMQFDEIRYCAEKDMFSFGFDYNNFDTYNITMGKTQWTVYTNGERLQSEFNNARRTGKTKSINLTETIKLLLEDNEINYADGHDIRIDMEKMDEDKKSEFFAQLLSLYKLTVQMRNSYTEAEEQENGISYDKIISPVINDEGEFFDSDNYKESDDKECKMPKDADANGAYCIALKGLYEVLKIKSEWTEDGFDRNCLKLPHAEWLDFIQNKRYE

SEQ ID NO: 6 - protein, 1300 aa, Francisella novicida
MSIYQEFVNKYSLSKTLRFELIPQGKTLENIKARGLILDDEKRAKDYKKAKQIIDKYHQFFIEEILSSVCISEDLLQNYSDVYFKLKKSDDDNLQKDFKSAKDTIKKQISEYIKDSEKFKNLFNQNLIDAKKGQESDLILWLKQSKDNGIELFKANSDITDIDEALEIIKSFKGWTTYFKGFHENRKVNYSSNDIPTSIIYRIVDDNLPKFLENKAKYESLKDKAPEAINYEQIKKDLAEELTFDIDYKTSEVNQRVFSLDEVFEIANFNNYLNQSGITKFNTIIGGKFVNGENTKRKGINEYINLYSQQINDKTLKKYKMSVLFKQILSDTESKSFVIDKLEDDSDVVTTMQSFYEQIAAFKTVEEKSIKETLSLLFDDLKAQKLDLSKIYFKNDKSLTDLSQQVFDDYSVIGTAVLEYITQQIAPKNLDNPSKKEQELIAKKTEKAKYLSLETIKLALEEFNKHRDIDKQCRFEEILANFAAIPMIFDEIAQNKDNLAQISIKYQNQGKKDLLQASAEDDVKAIKDLLDQTNNLLHKLKIFHISQSEDKANILDKDEHFYLVFEECYFELANIVPLYNKIRNYITQKPYSDEKFKLNFENSTLANGWDKNKEPDNTAILFIKDDKYYLGVMNKKNNKIFDDKAIKENKGEGYKKIVYKLLPGANKMLPKVFFSAKSIKFYNPSEDILRIRNHSTHTKNGSPQKGYEKFEFNIEDCRKFIDFYKQSISKHPEWKDFGFRFSDTQRYNSIDEFYREVENQGYKLTFENISESYIDSVVNQGKLYLFQIYNKDFSAYSKGRPNLHTLYWKALFDERNLQDVVYKLNGEAELFYRKQSIPKKITHPAKEAIANKNKDNPKKESVFEYDLIKDKRFTEDKFFFHCPITINFKSSGANKFNDEINLLLKEKANDVHILSIDRGERHLAYYTLVDGKGNIIKQDTFNIIGNDRMKTNYHDKLAAIEKDRDSARKDWKKINNIKEMKEGYLSQVVHEIAKLVIEYNAIVVFEDLNFGFKRGRFKVEKQVYQKLEKMLIEKLNYLVFKDNEFDKTGGVLRAYQLTAPFETFKKMGKQTGIIYYVPAGFTSKICPVTGFVNQLYPKYESVSKSQEFFSKFDKICYNLDKGYFEFSFDYKNFGDKAAKGKWTIASFGSRLINFRNSDKNHNWDTREVYPTKELEKLLKDYSIEYGHGECIKAAICGESDKKFFAKLTSVLNTILQMRNSKTGTELDYLISPVADVNGNFFDSRQAPKNMPQDADANGAYHIGLKGLMLLGRIKNNQEGKKLNLVIKNEEYFEFVQNRNN

SEQ ID NO: 7 - protein, 1206 aa, Unknown
  Lachnospiraceae sp.
MYYESLTKQYPVSKTIRNELIPIGKTLDNIRQNNILESDVKRKQNYEHVKGILDEYHKQLINEALDNCTLPSLKIAAEIYLKNQKEVSDREDFNKTQDLLRKEVVEKLKAHENFTKIGKKDILDLLEKLPSISEDDYNALESFRNFYTYFTSYNKVRENLYSDKEKSSTVAYRLINENFPKFLDNVKSYRFVKTAGILADGLGEEEQDSLFIVETFNKTLTQDGIDTYNSQVGKINSSINLYNQKNQKANGFRKIPKMKMLYKQILSDREESFIDEFQSDEVLIDNVESYGSVLIESLKSSKVSAFFDALRESKGKNVYVKNDLAKTAMSVIVFENWRTFDDLLNQEYDLANENKKKDDKYFEKRQKELKKNKSYSLEHLCNLSEDSCNLIENYIHQISDDIENIIINNETFLRIVINEHDRSRKLAKNRKAVKAIKDFLDSIKVLERELKLINSSGQELEKDLIVYSAHEELLVELKQVDSLYNMTRNYLTKKPFSTEKVKLNFNRSTLLNGWDRNKETDNLGVLLLKDGKYYLGIMNTSANKAFVNPPVAKTEKVFKKVDYKLLPVPNQMLPKVFFAKSNIDFYNPSSEIYSNYKKGTHKKGNMFSLEDCHNLIDFFKESISKHEDWSKFGFKFDTQASYNDISEFYREVEKQGYKLTYTDIDETYINDLIERNELYLFQIYNKDFSMYSKGKLNLHTLYFMMLFDQRNIDDVVYKLNGEAEVFYRPASISEDELIIHKAGEEIKNKNPNRARTKETSTFSYDIVKDKRYSKDKFTLHIPITMNFGVDEVKRFNDAVNSAIRIDENVNVIGIDRGERNLLYVVVIDSKGNILEQISLNSIINKEYDIETDYHALLDEREGGRDKARKDWNTVENIRDLKAGLYLQVVNVVAKLVLKYNAIICLEDLNFGFKRGRQKVEKQVYQKFEKMLIDKLNYLVIDKSREQTSPKELGGALNALQLTSKFKSFKELGKQSGVIYYVPAYLTSKIDPTTGFANLFYMKCENVEKSKRFFDGFDFIRFNALENVFEFGFDYRSFTQRACGINSKWTVCTNGERIIKYRNPDKNNMFDEKVVVVTDEMKNLFEQYKIPYEDGRNVKDMIISNEEAEFYRRLYRLLQQTLQMRNSTSDGTRDYIISPVKNKREAYFNSELSDGSVPKDADANGAYNIARKGLWVLEQIRQKSEGEKINLAMTNAEWLEYAQTHLL

SEQ ID NO: 8 - protein, 1233 aa, Unknown
  Lachnospiraceae sp.
MDYGNGQFERRAPLTKTITLRLKPIGETRETIREQKLLEQDAAFRKLVETVTPIVDDCIRKIADNALCHFGTEYDFSCLGNAISKNDSKAIKKETEKVEKLLAKVLTENLPDGLRKVNDINSAAFIQDTLTSFVQDDADKRVLIQELKGKTVLMQRFLTTRITALTVWLPDRVFENFNIFIENAEKMRILLDSPLNEKIMKFDPDAEQYASLEFYGQCLSQKDIDSYNLIISGIYADDEVKNPGINEIVKEYNQQIRGDKDESPLPKLKKLHKQILMPVEKAFFVRVLSNDSDARSILEKILKDTEMLPSKIIEAMKEADAGDIAVYGSRLHELSHVIYGDHGKLSQIIYDKESKRISELMETLSPKERKESKKRLEGLEEHIRKSTYTFDELNRYAEKNVMAAYIAAVEESCAEIMRKEKDLRTLLSKEDVKIRGNRHNTLIVKNYFNAWTVFRNLIRILRRKSEAEIDSDFYDVLDDSVEVLSLTYKGENLCRSYITKKIGSDLKPEIATYGSALRPNSRWWSPGEKFNVKFHTIVRRDGRLYYFILPKGAKPVELEDMDGDIECLQMRKIPNPTIFLPKLVFKDPEAFFRDNPEADEFVFLSGMKAPVTITRETYEAYRYKLYTVGKLRDGEVSEEEYKRALLQVLTAYKEFLENRMIYADLNFGFKDLEEYKDSSEFIKQVETHNTFMCWAKVSSSQLDDLVKSGNGLLFEIWSERLESYYKYGNEKVLRGYEGVLLSILKDENLVSMRTLLNSRPMLVYRPKESSKPMVVHRDGSRVVDRFDKDGKYIPPEVHDELYRFFNNLLIKEKLGEKARKILDNKKVKVKVLESERVKWSKFYDEQFAVTFSVKKNADCLDTTKDLNAEVMEQYSESNRLILIRNTTDILYYLVLDKNGKVLKQRSLNIINDGARDVDWKERFRQVTKDRNEGYNEWDYSRTSNDLKEVYLNYALKEIAEAVIEYNAILIIEKMSNAFKDKYSFLDDVTFKGFETKKLAKLSDLHFRGIKDGEPCSFTNPLQLCQNDSNKILQDGVIFMVPNSMTRSLDPDTGFIFAINDHNIRTKKAKLNFLSKFDQLKVSSEGCLIMKYSGDSLPTHNTDNRVWNCCCNHPITNYDRETKKVEFIEEPVEELSRVLEENGIETDTELNKLNERENVPGKVVDAIYSLVLNYLRGTVSGVAGQRAVYYSPVTGKKYDISFIQAMNLNRKCDYYRIGSKERGEWTDFVAQLIN

SEQ ID NO: 9 - protein, 1227 aa, Unknown
  Lachnospiraceae sp.
MSKLEKFTNCYSLSKTLRFKAIPVGKTQENIDNKRLLVEDEKRAEDYKGVKKLLDRYYLSFINDVLHSIKLKNLNNYISLFRKKTRTEKENKELENLEINLRKEIAKAFKGNEGYKSLFKKDIIETILPEFLDDKDEIALVNSFNGFTTAFTGFFDNRENMFSEEAKSTSIAFRCINENLTRYISNMDIFEKVDAIFDKHEVQEIKEKILNSDYDVEDFFEGEFFNFVLTQEGIDVYNAIIGGFVTESGEKIKGLNEYINLYNQKTKQKLPKFKPLYKQVLSDRESLSFYGEGYTSDEEVLEVFRNTLNKNSEIFSSIKKLEKLFKNFDEYSSAGIFVKNGPAISTISKDIFGEWNVIRDKWNAEYDDIHLKKKAVVTEKYEDDRRKSFKKIGSFSLEQLQEYADADLSVVEKLKEIIIQKVDEIYKVYGSSEKLFDADFVLEKSLKKNDAVVAIMKDLLDSVKSFENYIKAFFGEGKETNRDESFYGDFVLAYDILLKVDHIYDAIRNYVTQKPYSKDKFKLYFQNPQFMGGWDKDKETDYRATILRYGSKYYLAIMDKKYAKCLQKIDKDDVNGNYEKINYKLLPGPNKMLPKVFFSKKWMAYYNPSEDIQKIYKNGTFKKGDMFNLNDCHKLIDFFKDSISRYPKWSNAYDFNFSETEKYKDIAGFYREVEEQGYKVSFESASKKEVDKLVEEGKLYMFQIYNKDFSDKSHGTPNLHTMYFKLLFDENNHGQIRLSGGAELFMRRASLKKEELVVHPANSPIANKNPDNPKKTTTLSYDVYKDKRFSEDQYELHIPIANINKCPKNIFKINTEVRVLLKHDDNPYVIGIDRGERNLLYIVVVDGKGNIVEQYSLNEIINNFNGIRIKTDYHSLLDKKEKERFEARQNWTSIENIKELKAGYISQVVHKICELVEKYDAVIALEDLNSGFKNSRVKVEKQVYQKFEKMLIDKLNYMVDKKSNPCATGGALKGYQITNKFESFKSMSTQNGFIFYIPAWLTSKIDPSTGFVNLLKTKYTSIADKKFISSFDRIMYVPEEDLFEFALDYKNFSRTDADYIKKWKLYSYGNRIRIFRNPKKNNVFDWEEVCLTSAYKELFNKYGINYQQGDIRALLCEQSDKAFYSSFMALMSLMLQMRNSITGRTDVDFLISPVKNSDGIFYDSRNYEAQENAILPKNADANGAYNIARKVLWAIGQFKKAEDEKLDKVKIASNKEWLEYAQTSVKH

SEQ ID NO: 10 - protein, 1264 aa, Leptospira inadai
MEDYSGFVNIYSIQKTLRFELKPVGKTLEHIEKKGFLKKDKIRAEDYKAVKKIIDKYHRAYIEEVFDSVLHQKKKKDKTRFSTQFIKEIKEFSELYYKTEKNIPDKERLEALSEKLRKMLVGAFKGEFSEEVAEKYNKNLFSKELIRNEIEKFCETDEERKQVSNFKSFTTYFTGFHSNRQNIYSDEKKSTAIGYRIIHQNLPKFLDNLKIIESIQRRFKDFPWSDLKKNLKKIDKNIKLTEYFSIDGFVNVLNQKGIDAYNTILGGKSEESGEKIQGLNEYINLYRQKNNIDRKNPLNVKILFKQILGDRETKSFIPEAFPDDQSVLNSITEFAKYLKLDKKKKSIIAELKKFLSSFNRYELDGIYLANDNSLASISTFLFDDWSFIKKSVSFKYDESVGDPKKKIKSPLKYEKEKEKWLKQKYYTISFLNDAIESYSKSQDEKRVKIRLEAYFAEFKSKDDAKKQFDLLERIEEAYAIVEPLLGAEYPRDRNLKADKKEVGKIKDFLDSIKSLQFFLKPLLSAEIFDEKDLGFYNQLEGYYEEIDISGHLYNKVRNYLTGKIYSKEKFKLNFENSTLLKGWDENREVANLCVIFREDQKYYLGVMDKENNTILSDIPKVKPNELFYEKMVYKLIPTPHMQLPRIIFSSDNLSIYNPSKSILKIREAKSFKEGKNFKLKDCHKFIDFYKESISKNEDWSRFDFKFSKTSSYENISEFYREVERQGYNLDFKKVSKFYIDSLVEDGKLYLFQIYNKDFSIFSKGKPNLHTIYFRSLFSKENLKDVCLKLNGEAEMFFRKKSINYDEKKKREGHHPELFEKLKYPILKDKRYSEDKFQFHLPISLNFKSKERLNFNLKVNEFLKRNKDINIIGIDRGERNLLYLVMINQKGEILKQTLLDSMQSGKGRPEINYKEKLQEKEIERDKARKSWGTVENIKELKEGYLSIVIHQISKLMVENNAIVVLEDLNIGFKRGRQKVERQVYQKFEKMLIDKLNFLVFKENKPTEPGGVLKAYQLTDEFQSFEKLSKQTGFLFYVPSWNTSKIDPRTGFIDFLHPAYENIEKAKQWINKFDSIRFNSKMDWFEFTADTRKFSENLMLGKNRVWVICTTNVERYFTSKTANSSIQYNSIQITEKLKELFVDIPFSNGQDLKPEILRKNDAVFFKSLLFYIKTTLSLRQNNGKKGEEEKDFILSPVVDSKGRFFNSLEASDDEPKDADANGAYHIALKGLMNLLVLNETKEENLSRPKWKIKNKDWLEFVWERNR

SEQ ID NO: 11 - protein, 1373 aa, Moraxella bovoculi
MLFQDFTHLYPLSKTVRFELFIDRTLEHIHAKNFLSQDETMADMHQKVKVILDDYHRDFIADMMGEVKLTKLAEFYDVYLKFRKNPKDDELQKAQLKDLQAVLRKEIVKPIGNGGKYKAGYDRLFGAKLFKDGKELGDLAKFVIAQEGESSPKLAHLAHFEKFSTYFTGFHDNRKNMYSDEDKHTAIAYRLIHENLPRFIDNLQILTTIKQKHSALYDQIINELTASGLDVSLASHLDGYHKLLTQEGITAYNTLLGGISGEAGSPKIQGINELINSHHNQHCHKSERIAKLRPLHKQILSDGMSVSFLPSKFADDSEMCQAVNEFYRHYADVFAKVQSLFDGFDDHQKDGIYVEHKNLNELSKQAFGDFALLGRVLDGYYVDVVNPEFNERFAKAKTDNAKAKLTKEKDKFIKGVHSLASLEQAIEHYTARHDDESVQAGKLGQYFKHGLAGVDNPIQKIHNNHSTIKGFLERERPAGERALPKIKSGKNPEMTQLRQLKELLDNALNVAHFAKLLTTKTTLDNQDGNFYGEFGVLYDELAKIPTLYNKVRDYLSQKPFSTEKYKLNFGNPTLLNGWDLNKEKDNFGVILQKDGCYYLALLDKAHKKVFDNAPNTGKSIYQKMIYKYLEVRKQFPKVFFSKEAIAINYHPSKELVEIKDKGRQRSDDERLKLYRFILECLKIHPKYDKKFEGAIGDIQLFKKDKKGREVPISEKDLFKDINGIFSSKPKLEMEDFFIGEFKRYNPSQDLVDQYNIYKKIDSNDNRKKENFYNNHPKFKKDLVRYYYESMCKHEEWEESFEFSKKLQDIGCYVDVNELFTEIETRRLNYKISFCNINADYIDELVEQGQLYLFQIYNKDFSPKAHGKPNLHTLYFKALFSEDNLADPIYKLNGEAQIFYRKASLDMNETTIHRAGEVLENKNPDNPKKRQFVYDIIKDKRYTQKDFMLHVPITMNFGVQGMTIKEFNKKVNQSIQQYDEVNVIGIDRGERHLLYLTVINSKGEILEQCSLNDITTASANGTQMTTPYHKILDKREIERLNARVGWGEIETIKELKSGYLSHVVHQISQLMLKYNAIVVLEDLNFGFKRGRFKVEKQIYQNFENALIKKLNHLVLKDKADDEIGSYKNALQLTNNFTDLKSIGKQTGFLFYVPAWNTSKIDPETGFVDLLKPRYENIQASQAFFGKFDKICYNADKDYFEFHIDYAKFTDKAKNSRQIWTICSHGDKRYVYDKTANQNKGAAKGINVNDILKSLFARHHINEKQPNLVMDICQNNDKEFHKSLMYLLKTLLALRYSNASSDEDFILSPVANDEGVFFNSALADDTQPQNADANGAYHIALKGLWLLNELKNSDDLNKVKLAIDNQTWLNFAQNR

SEQ ID NO: 12 - protein, 1352 aa, Parcubacteria bacterium
MENIFDQFIGKYSLSKTLRFELKPVGKTEDFLKINKVFEKDQTIDDSYNQAKFYFDSLHQKFIDAALASDKTSELSFQNFADVLEKQNKIILDKKREMGALRKRDKNAVGIDRLQKEINDAEDIIQKEKEKIYKDVRTLFDNEAESWKTYYQEREVDGKKITESKADLKQKGADFLTAAGILKVLKYEFPEEKEKEFQAKNQPSLFVEEKENPGQKRYIFDSFDKFAGYLTKFQQTKKNLYAADGTSTAVATRIADNFIIFHQNTKVFRDKYKNNHTDLGFDEENIFEIERYKNCLLQREIEHIKNENSYNKIIGRINKKIKEYRDQKAKDTKLTKSDFPFFKNLDKQILGEVEKEKQLIEKTREKTEEDVLIERFKEFIENNEERFTAAKKLMNAFCNGEFESEYEGIYLKNKAINTISRRWFVSDRDFELKLPQQKSKNKSEKNEPKVKKFISIAEIKNAVEELDGDIFKAVFYDKKIIAQGGSKLEQFLVIWKYEFEYLFRDIERENGEKLLGYDSCLKIAKQLGIFPQEKEAREKATAVIKNYADAGLGIFQMMKYFSLDDKDRKNTPGQLSTNFYAEYDGYYKDFEFIKYYNEFRNFITKKPFDEDKIKLNFENGALLKGWDENKEYDFMGVILKKEGRLYLGIMHKNHRKLFQSMGNAKGDNANRYQKMIYKQIADASKDVPRLLLTSKKAMEKFKPSQEILRIKKEKTFKRESKNFSLRDLHALIEYYRNCIPQYSNWSFYDFQFQDTGKYQNIKEFTDDVQKYGYKISFRDIDDEYINQALNEGKMYLFEVVNKDIYNTKNGSKNLHTLYFEHILSAENLNDPVFKLSGMAEIFQRQPSVNEREKITTQKNQCILDKGDRAYKYRRYTEKKIMFHMSLVLNTGKGEIKQVQFNKIINQRISSSDNEMRVNVIGIDRGEKNLLYYSVVKQNGEIIEQASLNEINGVNYRDKLIEREKERLKNRQSWKPVVKIKDLKKGYISHVIHKICQLIEKYSAIVVLEDLNMRFKQIRGGIERSVYQQFEKALIDKLGYLVFKDNRDLRAPGGVLNGYQLSAPFVSFEKMRKQTGILFYTQAEYTSKTDPITGFRKNVYISNSASLDKIKEAVKKFDAIGWDGKEQSYFFKYNPYNLADEKYKNSTVSKEWAIFASAPRIRRQKGEDGYWKYDRVKVNEEFEKLLKVWNFVNPKATDIKQEIIKKIKAGDLQGEKELDGRLRNFWHSFIYLFNLVLELRNSFSLQIKIKAGEVIAVDEGVDFIASPVKPFFTTPNPYIPSNLCWLAVENADANGAYNIARKGVMILKKIREHAKKDPEFKKLPNLFISNAEWDEAARDWGKYAGTTALNLDH

SEQ ID NO: 13 - protein, 1260 aa, Porphyromonas crevioricanis
MDSLKDFTNLYPVSKTLRFELKPVGKTLENIEKAGILKEDEHRAESYRRVKKIIDTYHKVFIDSSLENMAKMGIENEIKAMLQSFCELYKKDHRTEGEDKALDKIRAVLRGLIVGAFTGVCGRRENTVQNEKYESLFKEKLIKEILPDFVLSTEAESLPFSVEEATRSLKEFDSFTSYFAGFYENRKNIYSTKPQSTAIAYRLIHENLPKFIDNILVFQKIKEPIAKELEHIRADFSAGGYIKKDERLEDIFSLNYYIHVLSQAGIEKYNALIGKIVTEGDGEMKGLNEHINLYNQQRGREDRLPLFRPLYKQILSDREQLSYLPESFEKDEELLRALKEFYDHIAEDILGRTQQLMTSISEYDLSRIYVRNDSQLTDISKKMLGDWNAIYMARERAYDHEQAPKRITAKYERDRIKALKGEESISLANLNSCIAFLDNVRDCRVDTYLSTLGQKEGPHGLSNLVENVFASYHEAEQLLSFPYPEENNLIQDKDNVVLIKNLLDNISDLQRFLKPLWGMGDEPDKDERFYGEYNYIRGALDQVIPLYNKVRNYLTRKPYSTRKVKLNFGNSQLLSGWDRNKEKDNSCVILRKGQNFYLAIMNNRHKRSFENKMLPEYKEGEPYFEKMDYKFLPDPNKMLPKVFLSKKGIEIYKPSPKLLEQYGHGTHKKGDTFSMDDLHELIDFFKHSIEAHEDWKQFGFKFSDTATYENVSSFYREVEDQGYKLSFRKVSESYVYSLIDQGKLYLFQIYNKDFSPCSKGTPNLHTLYWRMLFDERNLADVIYKLDGKAEIFFREKSLKNDHPTHPAGKPIKKKSRQKKGEESLFEYDLVKDRRYTMDKFQFHVPITMNFKCSAGSKVNDMVNAHIREAKDMHVIGIDRGERNLLYICVIDSRGTILDQISLNTINDIDYHDLLESRDKDRQQEHRNWQTIEGIKELKQGYLSQAVHRIAELMVAYKAVVALEDLNMGFKRGRQKVESSVYQQFEKQLIDKLNYLVDKKKRPEDIGGLLRAYQFTAPFKSFKEMGKQNGFLFYIPAWNTSNIDPTTGFVNLFHVQYENVDKAKSFFQKFDSISYNPKKDWFEFAFDYKNFTKKAEGSRSMWILCTHGSRIKNFRNSQKNGQWDSEEFALTEAFKSLFVRYEIDYTADLKTAIVDEKQKDFFVDLLKLFKLTVQMRNSWKEKDLDYLISPVAGADGRFFDTREGNKSLPKDADANGAYNIALKGLWALRQIRQTSEGGKLKLAISNKEWLQFVQERSYEKD

SEQ ID NO: 14 - protein, 1324 aa, Prevotella disiens
MENYQEFTNLFQLNKTLRFELKPIGKTCELLEEGKIFASGSFLEKDKVRADNVSYVKKEIDKKHKIFIEETLSSFSISNDLLKQYFDCYNELKAFKKDCKSDEEEVKKTALRNKCTSIQRAMREAISQAFLKSPQKKLLAIKNLIENVFKADENVQHFSEFTSYFSGFETNRENFYSDEEKSTSIAYRLVHDNLPIFIKNIYIFEKLKEQFDAKTLSEIFENYKLYVAGSSLDEVFSLEYFNNTLTQKGIDNYNAVIGKIVKEDKQEIQGLNEHINLYNQKHKDRRLPFFISLKKQILSDREALSWLPDMFKNDSEVIDALKGFYIEDGFENNVLTPLATLLSSLDKYNLNGIFIRNNEALSSLSQNVYRNFSIDEAIDAQNAELQTFNNYELIANALRAKIKKETKQGRKSFEKYEEYIDKKVKAIDSLSIQEINELVENYVSEFNSNSGNMPRKVEDYFSLMRKGDFGSNDLIENIKTKLSAAEKLLGTKYQETAKDIFKKDENSKLIKELLDATKQFQHFIKPLLGTGEEADRDLVFYGDFLPLYEKFEELTLLYNKVRNRLTQKPYSKDKIRLCFNKPKLMTGWVDSKTEKSDNGTQYGGYLFRKKNEIGEYDYFLGISSKAQLFRKNEAVIGDYERLDYYQPKANTIYGSAYEGENSYKEDKKRLNKVIIAYIEQIKQTNIKKSIIESISKYPNISDDDKVTPSSLLEKIKKVSIDSYNGILSFKSFQSVNKEVIDNLLKTISPLKNKAEFLDLINKDYQIFTEVQAVIDEICKQKTFIYFPISNVELEKEMGDKDKPLCLFQISNKDLSFAKTFSANLRKKRGAENLHTMLFKALMEGNQDNLDLGSGAIFYRAKSLDGNKPTHPANEAIKCRNVANKDKVSLFTYDIYKNRRYMENKFLFHLSIVQNYKAANDSAQLNSSATEYIRKADDLHIIGIDRGERNLLYYSVIDMKGNIVEQDSLNIIRNNDLETDYHDLLDKREKERKANRQNWEAVEGIKDLKKGYLSQAVHQIAQLMLKYNAIIALEDLGQMFVTRGQKIEKAVYQQFEKSLVDKLSYLVDKKRPYNELGGILKAYQLASSITKNNSDKQNGFLFYVPAWNTSKIDPVTGFTDLLRPKAMTIKEAQDFFGAFDNISYNDKGYFEFETNYDKFKIRMKSAQTRWTICTFGNRIKRKKDKNYWNYEEVELTEEFKKLFKDSNIDYENCNLKEEIQNKDNRKFFDDLIKLLQLTLQMRNSDDKGNDYIISPVANAEGQFFDSRNGDKKLPLDADANGAYNIARKGLWNIRQIKQTKNKDDLNLSISSTEWLDFVREKPYLK

SEQ ID NO: 15 - protein, 1484 aa, Unknown
  Peregrinibacteria bacterium
  misc_feature (1073)..(1073): Xaa can be any naturally occurring amino acid
MSNFFKNFTNLYELSKTLRFELKPVGDTLTNMKDHLEYDEKLQTFLKDQNIDDAYQALKPQFDEIHEEFITDSLESKKAKEIDFSEYLDLFQEKKELNDSEKKLRNKIGETFNKAGEKWKKEKYPQYEWKKGSKIANGADILSCQDMLQFIKYKNPEDEKIKNYIDDTLKGFFTYFGGFNQNRANYYETKKEASTAVATRIVHENLPKFCDNVIQFKHIIKRKKDGTVEKTERKTEYLNAYQYLKNNNKITQIKDAETEKMIESTPIAEKIFDVYYFSSCLSQKQIEEYNRIIGHYNLLINLYNQAKRSEGKHLSANEKKYKDLPKFKTLYKQIGCGKKKDLFYTIKCDTEEEANKSRNEGKESHSVEEIINKAQEAINKYFKSNNDCENINTVPDFINYILTKENYEGVYWSKAAMNTISDKYFANYHDLQDRLKEAKVFQKADKKSEDDIKIPEAIELSGLFGVLDSLADWQTTLFKSSILSNEKLKIITDSQTPSEALLKMIFNDIEKNMESFLKETNDIITLKKYKGNKEGTEKIKQWFDYTLAINRMLKYFLVKENKIKGNSLDTNISEALKTLIYSDDAEWFKWYDALRNYLTQKPQDEAKENKLKLNFDNPSLAGGWDVNKECSNFCVILKDKNEKKYLAMIKKGENTLFQKEWTEGRGKNLTKKSNPLFEINNCEILSKMEYDFWADVSKMIPKCSTQLKAVVNHFKQSDNEFIFPIGYKVTSGEKFREECKISKQDFELNNKVFNKNELSVTAMRYDLSSTQEKQYIKAFQKEYWELLFKQEKRDTKLTNNEIFNEWINFCNKKYSELLSWERKYKDALTNWINFCKYFLSKYPKTTLFNYSFKESENYNSLDEFYRDVDICSYKLNINTTINKSILDRLVEEGKLYLFEIKNQDSNDGKSIGHKNNLHTIYWNAIFENFDNRPKLNGEAEIFYRKAISKDKLGIVKGKKTKNGTWIIKNYRFSKEKFILHVPITLNFCSNNEYVNDIVNTKFYNFSNLHFLGIDRGEKHLAYYSLVNKNGEIVDQGTLNLPFTDKDGNQRSIKKEKYFYNKQEDKWEAKEVDXWNYNDLLDAMASNRDMARKNWQRIGTIKEAKNGYVSLVIRKIADLAVNNERPAFIVLEDLNTGFKRSRQKIDKSVYQKFELALAKKLNFLVDKNAKRDEIGSPTKALQLTPPVNNYGDIENKKQAGIMLYTRANYTSQTDPATGWRKTIYLKAGPEETTYKKDGKIKNKSVKDQIIETFTDIGFDGKDYYFEYDKGEFVDEKTGEIKPKKWRLYSGENGKSLDRFRGEREKDKYEWKIDKIDIVKILDDLFVNFDKNISLLKQLKEGVELTRNNEHGTGESLRFAINLIQQIRNTGNNERDNDFILSPVRDENGKHFDSREYWDKETKGEKISMPSSGDANGAFNIARKGIIMNAHILANSDSKDLSLFVSDEEWDLHLNNKTEWKKQLNIFSSRKAMAKRKKKRPAATKK

SEQ ID NO: 16 - protein, 1245 aa, Porphyromonas macacae
MKTQHFFEDFTSLYSLSKTIRFELKPIGKTLENIKKNGLIRRDEQRLDDYEKLKKVIDEYHEDFIANILSSFSFSEEILQSYIQNLSISEARAKIEKTMRDTLAKAFSEDERYKSIFKKELVKKDIPVWCPAYKSLCKKFDNFTTSLVPFHENRKNLYTSNEITASIPYRIVHVNLPKFIQNIEALCELQKKMGADLYLEMMENLRNVWPSFVKTPDDLCNLKTYNHLMVQSSISEYNRFVGGYSTEDGTKHQGINEWINIYRQRNKEMRLPGLVFLHKQILAKVDSSSFISDTLENDDQVFCVLRQFRKLFWNTVSSKEDDAASLKDLFCGLSGYDPEAIYVSDAHLATISKNIFDRWNYISDAIRRKTEVLMPRKKESVERYAEKISKQIKKRQSYSLAELDDLLAHYSEESLPAGFSLLSYFTSLGGQKYLVSDGEVILYEEGSNIWDEVLIAFRDLQVILDKDFTEKKLGKDEEAVSVIKKALDSALRLRKFFDLLSGTGAEIRRDSSFYALYTDRMDKLKGLLKMYDKVRNYLTKKPYSIEKFKLHFDNPSLLSGWDKNKELNNLSVIFRQNGYYYLGIMTPKGKNLFKTLPKLGAEEMFYEKMEYKQIAEPMLMLPKVFFPKKTKPAFAPDQSVVDIYNKKTFKTGQKGFNKKDLYRLIDFYKEALTVHEWKLFNFSFSPTEQYRNIGEFFDEVREQAYKVSMVNVPASYIDEAVENGKLYLFQIYNKDFSPYSKGIPNLHTLYWKALFSEQNQSRVYKLCGGGELFYRKASLHMQDTTVHPKGISIHKKNLNKKGETSLFNYDLVKDKRFTEDKFFFHVPISINYKNKKITNVNQMVRDYIAQNDDLQHGIDRGERNLLYISRIDTRGNLLEQFSLNVIESDKGDLRTDYQKILGDREQERLRRRQEWKSIESIKDLKDGYMSQVVHKICNMVVEHKAIVVLENLNLSFMKGRKKVEKSVYEKFERMLVDKLNYLVVDKKNLSNEPGGLYAAYQLTNPLFSFEELHRYPQSGILFFVDPWNTSLTDPSTGFVNLLGRINYTNVGDARKFFDRFNAIRYDGKGNILFDLDLSRFDVRVETQRKLWTLTTFGSRIAKSKKSGKWMVERIENLSLCFLELFEQFNIGYRVEKDLKKAILSQDRKEFYVRLIYLFNLMMQIRNSDGEEDYILSPALNEKNLQFDSRLIEAKDLPVDADANGAYNVARKGLMVVQRIKRGDHESIHRIGRAQWLRYVQEGIVE

SEQ ID NO: 17 - protein, 1250 aa, Smithella sp.
MQTLFENFTNQYPVSKTLRFELIPQGKTKDFIEQKGLLKKDEDRAEKYKKVKNIIDEYHKDFIEKSLNGLKLDGLEKYKTLYLKQEKDDKDKKAFDKEKENLRKQIANAFRNNEKFKTLFAKELIKNDLMSFACEEDKKNVKEFEAFTTYFTGFHQNRANMYVADEKRTAIASRLIHENLPKFIDNIKIFEKMKKEAPELLSPFNQTLKDMKDVIKGTTLEEIFSLDYFNKTLTQSGIDIYNSVIGGRTPEEGKTKIKGLNEYINTDFNQKQTDKKKRQPKFKQLYKQILSDRQSLSFIAEAFKNDTEILEAIEKFYVNELLHFSNEGKSTNVLDAIKNAVSNLESFNLTKMYFRSGASLTDVSRKVFGEWSIINRALDNYYATTYPIKPREKSEKYEERKEKWLKQDFNVSLIQTAIDEYDNETVKGKNSGKVIADYFAKFCDDKETDLIQKVNEGYIAVKDLLNTPCPENEKLGSNKDQVKQIKAFMDSIMDIMHFVRPLSLKDTDKEKDETFYSLFTPLYDHLTQTIALYNKVRNYLTQKPYSTEKIKLNFENSTLLGGWDLNKETDNTAIILRKDNLYYLGIMDKRHNRIFRNVPKADKKDFCYEKMVYKLLPGANKMLPKVFFSQSRIQEFTPSAKLLENYANETHKKGDNFNLNHCHKLIDFFKDSINKHEDWKNFDFRFSATSTYADLSGFYHEVEHQGYKISFQSVADSFIDDLVNEGKLYLFQIYNKDFSPFSKGKPNLHTLYWKMLFDENNLKDVVYKLNGEAEVFYRKKSIAEKNTTIHKANESIINKNPDNPKATSTFNYDIVKDKRYTIDKFQFHIPITMNFKAEGIFNMNQRVNQFLKANPDINIIGIDRGERHLLYYALINQKGKILKQDTLNVIANEKQKVDYHNLLDKKEGDRATARQEWGVIETIKELKEGYLSQVIHKLTDLMIENNAIIVMEDLNFGFKRGRQKVEKQVYQKFEKMLIDKLNYLVDKNKKANELGGLLNAFQLANKFESFQKMGKQNGFIFYVPAWNTSKTDPATGFIDFLKPRYENLNQAKDFFEKFDSIRLNSKADYFEFAFDFKNFTEKADGGRTKWTVCTTNEDRYQWNRALNNNRGSQEKYDITAELKSLFDGKVDYKSGKDLKQQIASQESADFFKALMKNLSITLSLRHNNGEKGDNEQDYILSPVADSKGRFFDSRKADDDMPKNADANGAYHIALKGLWCLEQISKTDDLKKVKLAISNKEWLEFVQTLKG

SEQ ID NO: 18 - DNA, 3987 bp, Artificial Sequence
  Synthetic polynucleotide
atggccgggagcaagaagcgccggataaagcaggacacgcagttcgagggcttcaccaacctgtaccaagtctccaagacgctccggttcgagcttatcccgcaagggaagaccctgaaacacatccaggaacaaggtttcatcgaggaggacaaggcccgcaacgaccactacaaggagctcaagcccataatcgatcggatctacaagacgtacgccgaccagtgcctccaactggtgcagctcgactgggagaacctgagcgccgccattgacagctaccgcaaggaaaagacggaggagacgcgcaacgcccttattgaggagcaagccacctaccgcaacgccatccacgactacttcatcgggcgcaccgacaacctgacggacgcgatcaacaagcgccacgcggaaatctacaagggccttttcaaggccgagctcttcaacgggaaggtcctaaaacagctcgggactgtcacgacaaccgagcatgagaacgccctccttcgcagcttcgacaagttcaccacatacttctcgggcttctaccggaaccgcaagaacgttttcagcgccgaggacatctccaccgccatcccgcacaggatcgtccaggacaacttccccaagttcaaggagaactgccacatcttcacgcgcctgattacagccgtaccttcacttcgtgagcacttcgagaacgtcaaaaaggccatcgggatcttcgtctccacgtccatcgaggaggtattctctttcccgttctataaccagctcctgacccagacgcagatcgacctctacaaccagctactgggcggcatcagccgggaggccgggaccgagaaaataaagggcctcaacgaagttctcaacctggccatccagaagaacgacgagaccgcgcatatcatcgcatccctgccgcatcgcttcattcctttgttcaagcagatattgagcgaccggaacaccctctcgttcatcctcgaagaattcaagagcgacgaggaggtcattcagtctttctgcaagtacaagacgctcctacggaatgagaatgtgctggagaccgcggaggcactcttcaatgagctgaactccattgacctgacccacatcttcattagccacaagaaactggagacgatctccagcgccctgtgcgaccactgggacactctccgcaacgccctctacgaacgccggatctccgaacttaccggcaagataactaagtcggctaaggagaaggtgcaacggagcctcaagcacgaggacatcaaccttcaggaaatcatctcagccgcgggcaaggagctgagcgaggcgtttaagcagaaaacatcggagatactgagccacgcgcacgcggccctggatcaaccgctgccgacgactctcaagaagcaagaggagaaggaaatccttaagtcccagctcgactcgctgctcggcctctatcacttgctcgactggttcgcggttgatgagtccaacgaggtggacccggagttctccgcgcgcctcacgggtattaagctggagatggagccaagcttaagcttctacaacaaggcccgcaactacgcgaccaaaaaaccgtactcagtcgagaaattcaagctgaatttccagatgcctacattggcgagggggtgggacgtgaaccgcgagaagaacaatggagccatcctgttcgtcaaaaatgggttgtactacctgggcatcatgcccaagcagaagggccgttacaaggccctgtcattcgagcctaccgagaagacctcggagggcttcgacaagatgtactacgactatttcccggacgccgccaagatgatcccgaagtgctccacgcagctcaaagccgtcacggcccacttccagacgcataccacgccgatacttctgagcaacaacttcattgagccgctagagatcacgaaggagatatacgacctaaacaaccccgaaaaggagcccaagaagttccagacagcctacgctaagaagacaggtgatcagaagggatatagggaggcactctgcaagtggatcgacttcacgcgcgacttcctgtcgaaatatacaaagacgaccagcattgacctaagttctctccgcccatcctcccagtacaaggatctgggcgagtattatgcggagctgaacccattgctgtaccacatcagcttccagaggatcgccgagaaggagattatggacgcggtggagacggggaaactatacctgttccaaatatataacaaggacttcgctaaagggcaccacgggaagcccaacctgcacacactctactggacgggcttgttttcgccagaaaatttggccaagacttcgatcaagctcaacggccaggcggagttgttttaccgtcccaagtctcgcatgaagcgcatggcgcatcgcctcggagagaaaatgcttaacaagaagctcaaggatcagaagacgcccatacctgatacgttgtaccaggaattgtacgactacgtgaaccaccgcctatcgcacgacctctcagacgaggcccgcgccctcctcccaaacgtgattactaaggaggtttcccatgaaataatcaaggaccgacggttcaccagcgacaaattttttttccacgtgcctatcacgctcaattaccaggcggccaactccccatcgaagttcaaccagcgcgtgaacgcctaccttaaggagcacccggagaccccaatcatcgggatcgaccgtggcgagcggaacctgatctatattacggtgatcgatagcaccgggaagatcctggagcagcgctccctgaacacaatccagcagtttgactaccagaagaaactcgacaaccgggagaaggagcgcgtcgcagcccggcaagcatggagtgtggtcggcaccataaaggacctgaaacagggttacctaagtcaagttatccacgagatcgttgacctgatgatacactatcaagccgtagtcgtgctggagaacctcaacttcgggtttaagtccaagcgcaccggcatcgcggagaaggcggtgtaccagcagttcgagaagatgctgatcgacaagctgaactgcctggtgctcaaggactaccctgcggagaaggtcggcggggtcttgaacccgtaccagctaaccgaccagttcacgagcttcgccaaaatgggcacgcagtccggattcttgttttatgtcccggctccatatacaagtaagatcgacccgctgacagggtttgttgacccattcgtgtggaagaccatcaagaaccacgagagcaggaaacacttcttagagggcttcgacttcctgcattacgacgttaagacaggcgacttcatcctgcacttcaagatgaaccgcaacctgtcgttccagaggggcctgcccggcttcatgcccgcctgggatatcgtctttgagaagaatgagacgcagttcgacgcgaaggggacgccgttcatcgctggaaagcggatcgtgccggtcatcgagaaccaccgcttcacgggtcgctaccgagatttataccccgccaacgaactaattgcgctgctggaggagaaggggatcgtgttccgagatggcagcaacattctcccgaagctgctggagaacgacgactcgcacgctattgacacgatggtcgccctcatacggagcgtgcttcagatgcggaacagtaacgctgccacgggcgaggactacattaactcccccgtccgcgacctcaacggggtctgcttcgatagccgcttccagaacccggagtggcctatggatgcggacgcgaacggggcctaccacatcgccctcaagggccaactcctgctcaaccacttgaaggaaagcaaagacctcaaattgcagaatggcatcagtaaccaggactggctcgcgtacatccaggaactgagaaacgggtccaagaagcggcgtatcaagcaagattga

SEQ ID NO: 19 - DNA, 3987 bp, Artificial Sequence
  Synthetic polynucleotide
atggcgggaagcaaaaagcgccggattaagcaagacacgcagttcgagggcttcacgaacctctaccaagtcagcaagaccctccggttcgagctgataccacagggaaagacgctcaagcacatccaggaacagggcttcatcgaggaggacaaggcgcgcaacgaccactacaaggagttgaaaccgatcatcgaccgcatctacaagacgtacgccgaccagtgcctccagctcgtgcagctcgactgggagaacctctccgccgccattgactcgtaccggaaggagaagactgaggagacccgcaacgccctgatcgaggagcaagcaacctaccggaacgccatccacgactacttcatcggccgcaccgacaacctcaccgacgcgatcaacaagcggcacgcggagatatacaaagggctgttcaaggcggagctgttcaacggcaaggtgctcaagcagctagggacggtgaccacgaccgagcacgagaacgcgctcctccgcagcttcgacaagttcaccacctacttcagcggcttctaccggaaccgcaagaatgtgttcagcgcggaggacatcagcacggccatcccgcaccgcatcgtccaggacaacttcccgaagttcaaggagaactgccacatcttcacccgcctgataaccgccgtcccctccctgcgggagcacttcgagaacgtcaaaaaggcaattgggatcttcgtctcgaccagcattgaggaggtgttcagcttccccttctacaaccagctcctcacccagacgcagatcgacctgtacaatcagttgctcggcgggataagccgcgaggcgggaaccgaaaaaatcaaggggctgaacgaagtgttgaacctcgccatccagaagaacgacgagaccgcgcacatcatcgcctccctgccccaccggttcatcccgctgttcaagcagatcctctctgaccggaacaccctgtccttcattcttgaggagttcaagtcggacgaggaggtcatccagagcttctgcaagtacaagacgctgctacggaacgagaacgtgctggagacggcggaggcactgttcaacgagctaaacagcatcgacctcacgcacatcttcatcagtcacaagaaactggagaccatctcctccgcgctgtgcgaccactgggacacgctcaggaacgcgctctacgagcgccgaatcagtgagctgacgggcaagatcacgaagtccgcgaaggagaaggtgcagcggtccctcaagcacgaggacatcaacctccaggagatcatctcagcggctgggaaagagctgtccgaggcgttcaagcagaaaacgagcgaaatcctgtcccacgcgcacgcggccctggatcagcctctgccgacgaccctcaagaaacaagaagaaaaggaaatcctcaagtcgcagctcgactcgctgctgggcctgtaccatctcctcgactggttcgccgtggacgagagcaacgaggtggaccccgagttctccgcgcggcttacggggatcaagctggagatggagcccagcctgtccttctacaacaaggcgcgcaactacgccaccaagaagccctacagcgtggagaagttcaagctcaacttccagatgcccactctcgcacgtgggtgggacgtcaaccgcgaaaaaaataatggggcgatcctgttcgtcaagaacggcctgtactacttgggcatcatgccgaaacagaagggccgctacaaggccctgagcttcgaaccgaccgagaaaacgagcgaggggttcgacaagatgtactacgactacttccccgacgccgcgaagatgattccaaagtgctccacgcagcttaaggccgtgacggcccacttccagacgcacacgaccccgatcctcctcagcaacaacttcatcgagcccctggagatcacgaaggagatatacgacctgaacaacccggagaaggagcccaagaaattccagaccgcctacgccaagaagacaggcgaccaaaagggttacagggaggccctctgcaagtggatcgacttcactagggacttcctgtccaagtacaccaagactacctctatcgacctgtccagcctccgcccgtcgtcccagtacaaagatttgggcgagtattacgcggagctgaacccactgctctaccacatcagcttccagcgcatcgcggagaaggagatcatggacgcagtggagacgggcaagctatacctatttcagatatacaacaaagacttcgctaagggacaccacggcaagcctaacctgcacaccctctactggacggggctcttcagcccggagaacctcgccaagacctcgatcaagctcaacggccaggccgagctgttctaccggcccaagtcccgcatgaagcggatggcccaccggctcggggagaaaatgctcaacaagaaattgaaggaccaaaaaacgccgatacccgacaccctataccaggagctgtacgactatgtgaaccaccgcctgagccacgacctcagcgacgaggcgcgggccctcctgccgaacgtcatcacaaaggaggtcagccacgagatcatcaaggaccggcgcttcacctccgacaagtttttctttcacgtgcccatcacgctcaactaccaggccgccaactcgccgtccaagttcaaccagcgcgtgaacgcctacctcaaggagcaccccgagaccccgatcatcgggattgaccgaggggagcggaacctcatctacatcaccgtcatcgacagcaccgggaagatccttgaacagcggtcgctcaacaccatccagcagttcgactaccagaagaaactcgacaaccgggagaaggagagagtggcggcccgccaggcttggtccgtcgtcgggacgattaaggacttgaaacaaggttacctgtcgcaagtgatccacgagatcgttgacctgatgatccactaccaagccgtcgtggtcctggagaacctcaacttcggcttcaagagcaaacgaaccggcatcgcggagaaggccgtgtaccagcagttcgaaaaaatgctgatcgacaagctgaactgcctcgtgctcaaggactaccccgctgagaaggtcggcggggtgctgaacccgtaccagctcactgaccagttcaccagcttcgcaaagatgggcacccagtccggcttcctgttctacgtgcctgcgccatacacctcgaagatcgacccgctcaccgggttcgtggaccccttcgtctggaagaccatcaagaaccacgagagccgcaagcacttcctggagggcttcgacttcctccactacgacgtcaagaccggggacttcatcctgcacttcaagatgaaccgcaacctcagtttccagcgcggcctgccggggttcatgcccgcttgggatatagtcttcgagaagaatgagacgcagttcgacgcgaagggcaccccgttcatcgccgggaagcgcatcgtgccggtcatcgagaaccaccggttcaccgggcgctaccgcgacctatacccggcgaacgagttgatcgccctcctggaggagaagggcatcgtgttccgcgacggctccaacatcctcccgaagctgctcgaaaacgacgactcccacgccatcgacacgatggtcgcgctgatccggtcggtgctccagatgcggaactccaacgccgcgacgggcgaggactacatcaacagtccggtccgcgatctgaacggcgtctgcttcgactcccggttccagaaccccgagtggccgatggacgcggacgcgaacggcgcataccacatcgccctaaaagggcaattgctgctcaaccacctcaaggaatccaaagacctaaagctccagaacggcatctccaaccaggactggctggcgtacatccaggaactgcggaacgggagcaaaaaacgtcggatcaagcaagattga

SEQ ID NO: 20 - DNA, 3987 bp, Artificial Sequence
  Synthetic polynucleotide
atggcgggctccaagaaacgccggattaagcaagatacccagttcgaggggttcacgaacctctaccaagtgagcaagaccctccgattcgaactgattcctcaggggaagaccctcaagcacatccaggagcaagggttcatcgaggaggacaaggcgcggaacgaccactacaaggaactcaaacccatcatcgaccgcatctacaagacctacgccgatcagtgcctccagctcgtgcagttggactgggagaacctcagcgcggccattgactcctaccggaaggagaaaacggaggagacgcgcaacgcgctcatcgaggaacaggcaacctatcgcaacgccatccacgactacttcatcgggaggactgacaacctcactgacgcgattaacaagcgccacgcggagatatacaagggactcttcaaagcggagctgtttaacggcaaggttctcaagcaactcggcactgtgaccacgaccgagcatgagaacgccctgctccgctccttcgacaagttcaccacctacttctccgggttctaccgcaaccgcaagaatgtcttcagcgcggaggacatcagcacggccattccacatcgaatcgtccaagataacttcccgaagttcaaggagaactgccacatcttcacccgactcattactgctgtaccgtcgttacgcgaacacttcgagaacgtcaagaaggcaattggaatcttcgtctctacgtcaatagaggaggtgttcagcttccctttctacaaccagctccttacgcagacccagatagacctgtacaatcagctcctcggtgggatcagccgggaggcggggactgagaagattaaagggctcaacgaggtcttgaacctggccatccaaaaaaacgatgagacggcgcacatcatcgcctcgctgccccaccggttcatcccgctgttcaagcagatcctcagtgacaggaacaccttgagctttatcctagaggagttcaagagcgacgaggaggtgatccagagcttctgcaagtacaaaaccctgctgaggaacgagaacgtcctggagacggcggaggcgctgttcaacgagctgaactctatcgacttaactcacatattcatctcgcacaagaagctggagactattagctctgcactctgcgaccactgggacaccctccgcaacgcgctctacgagcgccgcatctcggagctgaccgggaagatcaccaaatccgcgaaggaaaaggtccagcgttccctcaaacacgaggatattaacttacaggagattatctcagcggctgggaaggagttgtcagaggcgttcaagcagaaaacttccgagatcctgagccacgcgcacgcagcgctcgaccagcctctgcccaccaccctcaaaaagcaggaagaaaaagagatcctcaagagccagttggactccctgctggggctctatcaccttctcgactggttcgccgtcgatgagtcgaacgaggtggaccccgagttctccgcccggctgaccggcatcaagctagagatggagccgtccctcagcttctacaataaggcccgcaactacgcgaccaaaaaaccctacagcgtggagaagttcaagctgaacttccagatgccgaccttagcacgcggttgggacgtaaacagggagaagaacaatggagccatcctgttcgtcaagaacgggctttactacctcgggataatgcccaagcagaagggccgctacaaggccctttccttcgagccgacggagaaaacctccgaggggttcgacaagatgtactacgactacttccccgacgccgccaagatgatcccgaagtgctcaacgcagctaaaagccgtgaccgcccacttccagacccacacgacgccgatcctgctgagcaacaacttcatcgagccccttgagatcactaaggagatatacgacctgaacaaccccgagaaggagcccaagaagtttcaaaccgcctacgccaaaaaaactggcgaccaaaagggctacagggaggcgctgtgtaagtggatcgacttcacacgcgacttcctttcgaagtatacgaagacaacctctattgacctgagcagcctgcgtcctagctcccagtacaaagatttgggcgagtactacgcggagcttaatccactactctaccacatctcattccagcgcatcgctgagaaggaaatcatggacgcggtggagacaggcaaactgtacctcttccagatatacaacaaagacttcgctaaggggcaccacgggaagcccaaccttcatacgctctactggacgggcctattcagccccgaaaatctggccaagacctccatcaagctgaacggccaagcggagctgttctacagacccaagagccggatgaagcggatggcccacaggctcggcgagaaaatgcttaacaaaaagttgaaggaccagaaaacccctatccccgacaccctctaccaggaactgtacgactacgtgaaccacaggctctcgcacgacctttccgacgaggcccgtgccctactcccgaacgtcattaccaaagaggtttcgcacgagatcatcaaggaccggcggttcacgagcgacaagtttttctttcacgtccccatcacccttaactaccaggcggccaactccccatccaagttcaaccagcgtgtgaatgcctacctcaaggagcacccagagaccccgatcattgggatcgaccggggcgagcggaacctgatctacatcaccgtcatcgactcgacgggcaagattcttgagcagagatcgttgaataccatacagcagttcgactaccagaagaaactcgacaaccgcgagaaggagcgcgtggcggcccgccaggcgtggtccgtcgttgggacgattaaggacttgaaacaaggttatctgtcccaagtcatccacgagatcgttgatctgatgatccactatcaggcagtggtggtgctggagaatctcaacttcggcttcaagagtaagcggacgggaatcgccgagaaggccgtgtaccagcagttcgagaagatgctgatcgacaagctcaactgccttgtgctgaaagactacccggccgagaaggtcggcggcgtcctcaacccgtaccaacttaccgaccagttcacctccttcgccaagatgggcactcagtccgggttcttgttctacgtccccgcaccttacacctctaagatcgaccctctgactggcttcgtagatccattcgtgtggaagaccattaagaaccacgagagccgcaagcacttcctggagggcttcgacttcctgcactacgacgtgaagaccggggacttcatccttcacttcaagatgaaccggaacctcagcttccagcggggcctgccggggttcatgcccgcctgggacatcgtgttcgagaagaacgagacccagttcgacgcgaagggcacgcccttcatcgccgggaagcgtatcgtgccggtgatcgagaaccatcgtttcacgggtcgctaccgtgacctctacccggcgaacgagcttatcgcactcctggaggagaagggcatcgtcttccgggacggctccaacatcctcccgaaactgctggaaaacgacgactctcacgccatcgacacgatggtggccctcatccggtccgtgctccaaatgcggaacagcaacgccgccaccggtgaggactacatcaacagcccggtccgggatctgaacggggtgtgcttcgattcgcggttccagaatcctgagtggccgatggacgcggatgcaaacggggcgtaccacatcgcgctcaagggccagttacttctgaaccaccttaaggagtctaaagatttgaaactccagaacgggatctcgaaccaggactggctggcctacatccaagagttgcggaacggcagcaagaagcggcggattaagcaagattag

SEQ ID NO: 21 - DNA, 1592 bp, Medicago truncatula
actgttaataatttttaaacgtcagcgcactaaaaaaacgaaaagacggacacgtgaaaataaaaaacacacactagtttatgacgcaatactattttacttatgatttgggtacattagacaaaaccgtgaaagagatgtatcagctatgaaacctgtatacttcaatacagagacttactcatatcggatacgtacgcacgaagtatcatattaattattttaatttttaataaatattttatcggatacttatgtgatactctacatatacacaaggatatttctaagatactttatagatacgtatcctagaaaaacatgaagagtaaaaaagtgagacaatgttgtaaaaattcattataaatgtatatgattcaattttagatatgcatcagtataattgattctcgatgaaacacttaaaattatatttcttgtggaagaacgtagcgagagaggtgattcagttagacaacattaaataaaattaatgttaagttcttttaatgatgtttctctcaatatcacatcatatgaaaatgtaatatgatttataagaaaatttttaaaaaatttattttaataatcacatgtactattttttaaaaattgtatcttttataataatacaataataaagagtaatcagtgttaatttttcttcaaatataagttttattataaatcattgttaacgtatcataagtcattaccgtatcgtatcttaatttttttttaaaaaccgctaattcacgtacccgtattgtattgtacccgcacctgtatcacaatcgatcttagttagaagaattgtctcgaggcggtgcaagacagcatataatagacgtggactctcttataccaaacgttgtcgtatcacaaagggttaggtaacaagtcacagtttgtccacgtgtcacgttttaattggaagaggtgccgttggcgtaatataacagccaatcgatttttgctataaaagcaaatcaggtaaactaaacttcttcattcttttcttccccatcgctacaaaaccggttcctttggaaaagagattcattcaaacctagcacccaattccgtttcaaggtataatctactttctattcttcgattattttattattattagctactatcgtttaatcgatcttttcttttgatccgtcaaatttaaattcaattagggttttgttcttttctttcatctgattgaaatccttctgaattgaaccgtttacttgattttactgtttattgtatgatttaatcctttgtttttcaaagacagtctttagattgtgattaggggttcatataaatttttagatttggatttttgtattgtatgattcaaaaaatacgtcctttaattagattagtacatggatattttttacccgatttattgattgtcagggagaatttgatgagcaagtttttttgatgtctgttgtaaattgaattgattataattgctgatctgctgcttccagttttcataacccatattcttttaaccttgttgtacacacaatgaaaaattggtgattgattcatttgtttttctttgttttggattatacagg

SEQ ID NO: 22 - DNA, 2000 bp, Zea mays
gtcgtgcccctctctagagataaagagcattgcatgtctaaagtataaaaaattaccacatatttttttgtcacacttatttgaagtgtagtttatctatctctatacatatatttaaacttcactctacaaataatatagtctataatactaaaataatattagtgttttagaggatcatataaataaactgctagacatggtctaaaggataattgaatattttgacaatctacagttttatctttttagtgtgcatgtgatctctctgttttttttgcaaatagcttgacctatataatacttcatccattttattagtacatccatttaggatttagggttgatggtttctatagactaatttttagtacatccattttattctttttagtctctaaattttttaaaactaaaactctattttagttttttatttaataatttagatataaaatgaaataaaataaattgactacaaataaaacaaataccctttaagaaataaaaaaactaagcaaacatttttcttgtttcgagtagataatgacaggctgttcaacgccgtcgacgagtctaacggacaccaaccagcgaaccagcagcgtcgcgtcgggccaagcgaagcagacggcacggcatctctgtagctgcctctggacccctctcgagagttccgctccaccgttggacttgctccgctgtcggcatccagaaattgcgtggcggagcggcagacgtgaggcggcacggcaggcggcctcttcctcctctcacggcaccggcagctacgggggattcctttcccaccgctccttcgctttcccttcctcgcccgccgtaataaatagacaccccctccacaccctctttccccaacctcgtgttcgttcggagcgcacacacacgcaaccagatctcccccaaatccagccgtcggcacctccgcttcaaggtacgccgctcatcctccccccccccctctctctaccttctctagatcggcgatccggtccatggttagggcccggtagttctacttctgttcatgtttgtgttagagcaaacatgttcatgttcatgtttgtgatgatgtggtctggttgggcggtcgttctagatcggagtaggatactgtttcaagctacctggtggatttattaattttgtatctgtatgtgtgtgccatacatcttcatagttacgagtttaagatgatggatggaaatatcgatctaggataggtatacatgttgatgcgggttttactgatgcatatacagagatgctttttttctcgcttggttgtgatgatatggtctggttgggcggtcgttctagatcggagtagaatactgtttcaaactacctggtggatttattaaaggataaagggtcgttctagatcggagtagaatactgtttcaaactacctggtggatttattaaaggatctgtatgtatgtgcctacatcttcatagttacgagtttaagatgatggatggaaatatcgatctaggataggtatacatgttgatgcgggttttactgatgcatatacagagatgctttttttcgcttggttgtgatgatgtggtctggttgggcggtcgttctagatcggagtagaatactgtttcaaactacctggtggatttattaattttgtatctttatgtgtgtgccatacatcttcatagttacgagtttaagatgatggatggaaatattgatctaggataggtatacatgttgatgtgggttttactgatgcatatacatgatggcatatgcggcatctattcatatgctctaaccttgagtacctatctattataataaacaagtatgttttataattattttgatcttgatatacttggatgatggcatatgcagcagctatatgtggattttttagccctgccttcatacgctatttatttgcttggtactgtttcttttgtccgatgctcaccctgttgtttggtgatacttc

SEQ ID NO: 23 - protein, 228 aa, Rattus norvegicus
SSETGPVAVDPTLRRRIEPHEFEVFFDPRELRKETCLLYEINWGGRHSIWRHTSQNTNKHVEVNFIEKFTTERYFCPNTRCSITWFLSWSPCGECSRAITEFLSRYPHVTLFIYIARLYHHADPRNRQGLRDLISSGVTIQIMTEQESGYCWRNFVNYSPSNEAHWPRYPHLWVRLYVLELYCIILGLPPCLNILRRKQPQLTFFTIALQSCHYQRLPPHILWATGLK

SEQ ID NO: 24 - protein, 199 aa, Homo sapiens
MEASPASGPRHLMDPHIFTSNFNNGIGRHKTYLCYEVERLDNGTSVKMDQHRGFLHNQAKNLLCGFYGRHAELRFLDLVPSLQLDPAQIYRVTWFISWSPCFSWGCAGEVRAFLQENTHVRLRIFAARIYDYDPLYKEALQMLRDAGAQVSIMTYDEFKHCWDTFVDHQGCPFQPWDGLDEHSQALSGRLRAILQNQGN

SEQ ID NO: 25 - DNA, 621 bp, Petromyzon marinus
acagatgcagagtatgtgagaattcacgaaaagctggacatctataccttcaagaagcagttctttaacaataagaagtctgtgagccataggtgctacgtgctgttcgagctgaagagaaggggtgaaagaagggcatgtttttgggggtatgctgtgaacaagccccagtctggaactgagagaggcattcacgccgaaattttcagcatcagaaaggtggaggaatacctgagggataaccctggacagtttacaattaattggtattctagctggtctccatgcgctgactgtgccgagaagatcctggaatggtacaaccaggagctgagaggaaatggccataccctgaagatttgggcctgcaagctgtactatgaaaagaacgcaagaaatcagatcggactgtggaacctgagggataatggtgtggggctgaacgtgatggtgtccgagcactatcagtgctgtagaaagattttcattcagtcctcacataatcagctgaacgagaatagatggctggaaaagactctgaagagggctgagaagagaaggtccgaactgtcaattatgatccaggtgaagatcctgcacaccactaagtcacctgccgtg

SEQ ID NO: 26 - protein, 160 aa, Artificial Sequence
  Synthetic polypeptide
FERNYDPRELRKETYLLYEIKWGKSGKLWRHWCQNNRTQHAEVYFLENIFNARRFNPSTHCSITWYLSWSPCAECSQKIVDFLKEHPNVLEIYVARLYYHEDERNRQGLRDLVNSGVTIRIMDLPDYNYCWKTFVSDQGGDEDYWPGHFAPWIKQYSLKL

SEQ ID NO: 27 - protein, 207 aa, Artificial Sequence
  Synthetic polypeptide
TDAEYVRIHEKLDIYTFKKQFSNNKKSVSHRCYVLFELKRRGERRACFWGYAVNKPQSGTERGIHAEIFSIRKVEEYLRDNPGQFTINWYSSWSPCADCAEKILEWYNQELRGNGHTLKIWVCKLYYEKNARNQIGLWNLRDNGVGLNVMVSEHYQCCRKIFIQSSHNQLNENRWLEKTLKRAEKRRSELSIMFQVKILHTTKSPAV

SEQ ID NO: 28 - protein, 228 aa, Artificial Sequence
  Synthetic polypeptide
SSKTGPVAVDPTLRRRIEPHEFEVFFDPRELRKETCLLYEINWGGRHSIWRHTSQNTNKHVEVNFIEKFTTERYFCPNTRCSITWFLSWSPCGECSRAITEFLSRYPNVTLFIYIARLYHLANPRNRQGLRDLISSGVTIQIMTEQESGYCWHNFVNYSPSNESHWPRYPHLWVRLYVLELYCIILGLPPCLNILRRKQSQLTSFTIALQSCHYQRLPPHILWATGLK

SEQ ID NO: 29 - protein, 162 aa, Artificial Sequence
  Synthetic polypeptide
SFERNYDPRELRKETYLLYEIKWGKSGKLWRHWCQNNRTQHAEVYFLENIFNARRFNPSTHCSITWYLSWSPCAECSQKIVDFLKEHPNVNLEIYVARLYYPENERNRQGLRDLVNSGVTIRIMDLPDYNYCWKTFVSDQGGDEDYWPGHFAPWIKQYSLKL

SEQ ID NO: 30 - protein, 166 aa, Escherichia coli
SEVEFSHEYWMRHALTLAKRAWDEREVPVGAVLVHNNRVIGEGWNRPIGRHDPTAHAEIMALRQGGLVMQNYRLIDATLYVTLEPCVMCAGAMIHSRIGRVVFGARDAKTGAAGSLMDVLHHPGMNHRVEITEGILADECAALLSDFFRMRRQEIKAQKKAQSSTD

SEQ ID NO: 31 - protein, 166 aa, Artificial Sequence
  Synthetic polypeptide
SEVEFSHEYWMRHALTLAKRARDEREVPVGAVLVLNNRVIGEGWNRAIGLHDPTAHAEIMALRQGGLVMQNYRLIDATLYVTFEPCVMCAGAMIHSRIGRVVFGVRNAKTGAAGSLMDVLHYPGMNHRVEITEGILADECAALLCYFFRMPRQVFNAQKKAQSSTD

SEQ ID NO: 32 - protein, 166 aa, Artificial Sequence
  Synthetic polypeptide
SEVEFSHEYWMRHALTLAKRAWDEREVPVGAVLVLNNRVIGEGWNRSIGLHDPTAHAEIMALRQGGLVMQNYRLIDATLYVTFEPCVMCAGAMIHSRIGRVVFGVRNAKTGAAGSLMDVLHYPGMNHRVEITEGILADECAALLCYFFRMRRQVFNAQKKAQSSTD

SEQ ID NO: 33 - protein, 166 aa, Artificial Sequence
  Synthetic polypeptide
SEVEFSHEYWMRHALTLAKRALDEREVPVGAVLVLNNRVIGEGWNRAIGLHDPTAHAEIMALRQGGLVMQNYRLIDATLYVTFEPCVMCAGAMIHSRIGRVVFGVRNAKTGAAGSLMDVLHYPGMNHRVEITEGILADECNALLCYFFRMRRQVFNAQKKAQSSTD

SEQ ID NO: 34 - protein, 166 aa, Artificial Sequence
  Synthetic polypeptide
SEVEFSHEYWMRHALTLAKRALDEREVPVGAVLVLNNRVIGEGWNRAIGLHDPTAHAEIMALRQGGLVMQNYRLIDATLYVTFEPCVMCAGAMIHSRIGRVVFGVRNAKTGAAGSLMDVLHYPGMNHRVEITEGILADECNALLCYFFRMPRQVFNAQKKAQSSTD

SEQ ID NO: 35 - protein, 1763 aa, Artificial Sequence
  Synthetic polypeptide
SEVEFSHEYWMRHALTLAKRAWDEREVPVGAVLVHNNRVIGEGWNRPIGRHDPTAHAEIMALRQGGLVMQNYRLIDATLYVTLEPCVMCAGAMIHSRIGRVVFGARDAKTGAAGSLMDVLHHPGMNHRVEITEGILADECAALLSDFFRMRRQEIKAQKKAQSSTDSGGSSGGSSGSETPGTSESATPESSGGSSGGSSEVEFSHEYWMRHALTLAKRARDEREVPVGAVLVLNNRVIGEGWNRAIGLHDPTAHAEIMALRQGGLVMQNYRLIDATLYVTFEPCVMCAGAMIHSRIGRVVFGVRNAKTGAAGSLMDVLHYPGMNHRVEITEGILADECAALLCYFFRMPRQVFNAQKKAQSSTDSGGSSGGSSGSETPGTSESATPESSGGSSGGSDKKYSIGLAIGTNSVGWAVITDEYKVPSKKFKVLGNTDRHSIKKNLIGALLFDSGETAEATRLKRTARRRYTRRKNRICYLQEIFSNEMAKVDDSFFHRLEESFLVEEDKKHERHPIFGNIVDEVAYHEKYPTIYHLRKKLVDSTDKADLRLIYLALAHMIKFRGHFLIEGDLNPDNSDVDKLFIQLVQTYNQLFEENPINASGVDAKAILSARLSKSRRLENLIAQLPGEKKNGLFGNLIALSLGLTPNFKSNFDLAEDAKLQLSKDTYDDDLDNLLAQIGDQYADLFLAAKNLSDAILLSDILRVNTEITKAPLSASMIKRYDEHHQDLTLLKALVRQQLPEKYKEIFFDQSKNGYAGYIDGGASQEEFYKFIKPILEKMDGTEELLVKLNREDLLRKQRTFDNGSIPHQIHLGELHAILRRQEDFYPFLKDNREKIEKILTFRIPYYVGPLARGNSRFAWMTRKSEETITPWNFEEVVDKGASAQSFIERMTNFDKNLPNEKVLPKHSLLYEYFTVYNELTKVKYVTEGMRKPAFLSGEQKKAIVDLLFKTNRKVTVKQLKEDYFKKIECFDSVEISGVEDRFNASLGTYHDLLKIIKDKDFLDNEENEDILEDIVLTLTLFEDREMIEERLKTYAHLFDDKVMKQLKRRRYTGWGRLSRKLINGIRDKQSGKTILDFLKSDGFANRNFMQLIHDDSLTFKEDIQKAQVSGQGDSLHEHIANLAGSPAIKKGILQTVKVVDELVKVMGRHKPENIVIEMARENQTTQKGQKNSRERMKRIEEGIKELGSQILKEHPVENTQLQNEKLYLYYLQNGRDMYVDQELDINRLSDYDVDHIVPQSFLKDDSIDNKVLTRSDKNRGKSDNVPSEEVVKKMKNYWRQLLNAKLITQRKFDNLTKAERGGLSELDKAGFIKRQLVETRQITKHVAQILDSRMNTKYDENDKLIREVKVITLKSKLVSDFRKDFQFYKVREINNYHHAHDAYLNAVVGTALIKKYPKLESEFVYGDYKVYDVRKMIAKSEQEIGKATAKYFFYSNIMNFFKTEITLANGEIRKRPLIETNGETGEIVWDKGRDFATVRKVLSMPQVNIVKKTEVQTGGFSKESILPKRNSDKLIARKKDWDPKKYGGFDSPTVAYSVLVVAKVEKGKSKKLKSVKELLGITIMERSSFEKNPIDFLEAKGYKEVKKDLIIKLPKYSLFELENGRKRMLASAGELQKGNELALPSKYVNFLYLASHYEKLKGSPEDNEQKQLFVEQHKHYLDEIIEQISEFSKRVILADANLDKVLSAYNKHRDKPIREQAENIIHLFTLTNLGAPAAFKYFDTTIDRKRYTSTKEVLDATLIHQSITGLYETRIDLSQLGGD

SEQ ID NO: 36 - protein, 1565 aa, Artificial Sequence
  Synthetic polypeptide
SEVEFSHEYWMRHALTLAKRARDEREVPVGAVLVLNNRVIGEGWNRAIGLHDPTAHAEIMALRQGGLVMQNYRLIDATLYVTFEPCVMCAGAMIHSRIGRVVFGVRNSKRGAAGSLMNVLNYPGMNHRVEITEGILADECAALLCDFYRMPRQVFNAQKKAQSSINSGGSSGGSSGSETPGTSESATPESSGGSSGGSDKKYSIGLAIGTNSVGWAVITDEYKVPSKKFKVLGNTDRHSIKKNLIGALLFDSGETAEATRLKRTARRRYTRRKNRICYLQEIFSNEMAKVDDSFFHRLEESFLVEEDKKHERHPIFGNIVDEVAYHEKYPTIYHLRKKLVDSTDKADLRLIYLALAHMIKFRGHFLIEGDLNPDNSDVDKLFIQLVQTYNQLFEENPINASGVDAKAILSARLSKSRRLENLIAQLPGEKKNGLFGNLIALSLGLTPNFKSNFDLAEDAKLQLSKDTYDDDLDNLLAQIGDQYADLFLAAKNLSDAILLSDILRVNTEITKAPLSASMIKRYDEHHQDLTLLKALVRQQLPEKYKEIFFDQSKNGYAGYIDGGASQEEFYKFIKPILEKMDGTEELLVKLNREDLLRKQRTFDNGSIPHQIHLGELHAILRRQEDFYPFLKDNREKIEKILTFRIPYYVGPLARGNSRFAWMTRKSEETITPWNFEEVVDKGASAQSFIERMTNFDKNLPNEKVLPKHSLLYEYFTVYNELTKVKYVTEGMRKPAFLSGEQKKAIVDLLFKTNRKVTVKQLKEDYFKKIECFDSVEISGVEDRFNASLGTYHDLLKIIKDKDFLDNEENEDILEDIVLTLTLFEDREMIEERLKTYAHLFDDKVMKQLKRRRYTGWGRLSRKLINGIRDKQSGKTILDFLKSDGFANRNFMQLIHDDSLTFKEDIQKAQVSGQGDSLHEHIANLAGSPAIKKGILQTVKVVDELVKVMGRHKPENIVIEMARENQTTQKGQKNSRERMKRIEEGIKELGSQILKEHPVENTQLQNEKLYLYYLQNGRDMYVDQELDINRLSDYDVDHIVPQSFLKDDSIDNKVLTRSDKNRGKSDNVPSEEVVKKMKNYWRQLLNAKLITQRKFDNLTKAERGGLSELDKAGFIKRQLVETRQITKHVAQILDSRMNTKYDENDKLIREVKVITLKSKLVSDFRKDFQFYKVREINNYHHAHDAYLNAVVGTALIKKYPKLESEFVYGDYKVYDVRKMIAKSEQEIGKATAKYFFYSNIMNFFKTEITLANGEIRKRPLIETNGETGEIVWDKGRDFATVRKVLSMPQVNIVKKTEVQTGGFSKESILPKRNSDKLIARKKDWDPKKYGGFDSPTVAYSVLVVAKVEKGKSKKLKSVKELLGITIMERSSFEKNPIDFLEAKGYKEVKKDLIIKLPKYSLFELENGRKRMLASAGELQKGNELALPSKYVNFLYLASHYEKLKGSPEDNEQKQLFVEQHKHYLDEIIEQISEFSKRVILADANLDKVLSAYNKHRDKPIREQAENIIHLFTLTNLGAPAAFKYFDTTIDRKRYTSTKEVLDATLIHQSITGLYETRIDLSQLGGD

SEQ ID NO: 37 - protein, 1565 aa, Artificial Sequence
  Synthetic polypeptide
SEVEFSHEYWMRHALTLAKRARDEREVPVGAVLVLNNRVIGEGWNRAIGLHDPTAHAEIMALRQGGLVMQNYRLYDATLYSTFEPCVMCAGAMIHSRIGRVVFGVRNAKTGAAGSLMDVLHHPGMNHRVEITEGILADECAALLCRFFRMPRRVFNAQKKAQSSTDSGGSSGGSSGSETPGTSESATPESSGGSSGGSDKKYSIGLAIGTNSVGWAVITDEYKVPSKKFKVLGNTDRHSIKKNLIGALLFDSGETAEATRLKRTARRRYTRRKNRICYLQEIFSNEMAKVDDSFFHRLEESFLVEEDKKHERHPIFGNIVDEVAYHEKYPTIYHLRKKLVDSTDKADLRLIYLALAHMIKFRGHFLIEGDLNPDNSDVDKLFIQLVQTYNQLFEENPINASGVDAKAILSARLSKSRRLENLIAQLPGEKKNGLFGNLIALSLGLTPNFKSNFDLAEDAKLQLSKDTYDDDLDNLLAQIGDQYADLFLAAKNLSDAILLSDILRVNTEITKAPLSASMIKRYDEHHQDLTLLKALVRQQLPEKYKEIFFDQSKNGYAGYIDGGASQEEFYKFIKPILEKMDGTEELLVKLNREDLLRKQRTFDNGSIPHQIHLGELHAILRRQEDFYPFLKDNREKIEKILTFRIPYYVGPLARGNSRFAWMTRKSEETITPWNFEEVVDKGASAQSFIERMTNFDKNLPNEKVLPKHSLLYEYFTVYNELTKVKYVTEGMRKPAFLSGEQKKAIVDLLFKTNRKVTVKQLKEDYFKKIECFDSVEISGVEDRFNASLGTYHDLLKIIKDKDFLDNEENEDILEDIVLTLTLFEDREMIEERLKTYAHLFDDKVMKQLKRRRYTGWGRLSRKLINGIRDKQSGKTILDFLKSDGFANRNFMQLIHDDSLTFKEDIQKAQVSGQGDSLHEHIANLAGSPAIKKGILQTVKVVDELVKVMGRHKPENIVIEMARENQTTQKGQKNSRERMKRIEEGIKELGSQILKEHPVENTQLQNEKLYLYYLQNGRDMYVDQELDINRLSDYDVDHIVPQSFLKDDSIDNKVLTRSDKNRGKSDNVPSEEVVKKMKNYWRQLLNAKLITQRKFDNLTKAERGGLSELDKAGFIKRQLVETRQITKHVAQILDSRMNTKYDENDKLIREVKVITLKSKLVSDFRKDFQFYKVREINNYHHAHDAYLNAVVGTALIKKYPKLESEFVYGDYKVYDVRKMIAKSEQEIGKATAKYFFYSNIMNFFKTEITLANGEIRKRPLIETNGETGEIVWDKGRDFATVRKVLSMPQVNIVKKTEVQTGGFSKESILPKRNSDKLIARKKDWDPKKYGGFDSPTVAYSVLVVAKVEKGKSKKLKSVKELLGITIMERSSFEKNPIDFLEAKGYKEVKKDLIIKLPKYSLFELENGRKRMLASAGELQKGNELALPSKYVNFLYLASHYEKLKGSPEDNEQKQLFVEQHKHYLDEIIEQISEFSKRVILADANLDKVLSAYNKHRDKPIREQAENIIHLFTLTNLGAPAAFKYFDTTIDRKRYTSTKEVLDATLIHQSITGLYETRIDLSQLGGD

SEQ ID NO: 38 - protein, 364 aa, Artificial Sequence
  Synthetic polypeptide
SEVEFSHEYWMRHALTLAKRAWDEREVPVGAVLVHNNRVIGEGWNRPIGRHDPTAHAEIMALRQGGLVMQNYRLIDATLYVTLEPCVMCAGAMIHSRIGRVVFGARDAKTGAAGSLMDVLHHPGMNHRVEITEGILADECAALLSDFFRMRRQEIKAQKKAQSSTDSGGSSGGSSGSETPGTSESATPESSGGSSGGSSEVEFSHEYWMRHALTLAKRARDEREVPVGAVLVLNNRVIGEGWNRAIGLHDPTAHAEIMALRQGGLVMQNYRLIDATLYVTFEPCVMCAGAMIHSRIGRVVFGVRNAKTGAAGSLMDVLHYPGMNHRVEITEGILADECAALLCYFFRMPRQVFNAQKKAQSSTD

SEQ ID NO: 39 - protein, 167 aa, Artificial Sequence
  Synthetic polypeptide
MSEVEFSHEYWMRHALTLAKRARDEREVPVGAVLVLNNRVIGEGWNRAIGLHDPTAHAEIMALRQGGLVMQNYRLYDATLYSTFEPCVMCAGAMIHSRIGRVVFGVRNAKTGAAGSLMDVLHHPGMNHRVEITEGILADECAALLCRFFRMPRRVFNAQKKAQSSTD

SEQ ID NO: 40 - protein, 167 aa, Artificial Sequence
  Synthetic polypeptide
MSEVEFSHEYWMRHALTLAKRARDEREVPVGAVLVLNNRVIGEGWNRAIGLHDPTAHAEIMALRQGGLVMQNYRLIDATLYVTFEPCVMCAGAMIHSRIGRVVFGVRNSKRGAAGSLMNVLNYPGMNHRVEITEGILADECAALLCDFYRMPRQVFNAQKKAQSSIN

SEQ ID NO: 41 - protein, 83 aa, Bacillus phage AR9
TNLSDIIEKETGKQLVIQESILMLPEEVEEVIGNKPESDILVHTAYDESTDENVMLLTSDAPEYKPWALVIQDSNGENKIKML

SEQ ID NO: 42 - RNA, 19 nt, Artificial Sequence
  Synthetic oligonucleotide
  misc_feature (1)..(19): n is a, c, g, or u
nnnnnnnnnnnnnnnnnnn

SEQ ID NO: 43 - DNA, 22 bp, Artificial Sequence
  Synthetic oligonucleotide
  misc_feature (4)..(22): n is a, c, g, or t
aaannnnnnnnnnnnnnnnnnn

SEQ ID NO: 44 - DNA, 22 bp, Artificial Sequence
  Synthetic oligonucleotide
  misc_feature (1)..(19): n is a, c, g, or t
nnnnnnnnnnnnnnnnnnnttt

SEQ ID NO: 45 - protein, 24 aa, Artificial Sequence
  Synthetic peptide
EELLSKNYHLENEVARLKKGSGSG

SEQ ID NO: 46 - protein, 241 aa, Artificial Sequence
  Synthetic polypeptide
EEELLSKNYHLENEVARLKKGSGSGEELLSKNYHLENEVARLKKGSGSGEELLSKNYHLENEVARLKKGSGSGEELLSKNYHLENEVARLKKGSGSGEELLSKNYHLENEVARLKKGSGSGEELLSKNYHLENEVARLKKGSGSGEELLSKNYHLENEVARLKKGSGSGEELLSKNYHLENEVARLKKGSGSGEELLSKNYHLENEVARLKKGSGSGEELLSKNYHLENEVARLKKGSGSG

SEQ ID NO: 47 - protein, 277 aa, Artificial Sequence
  Synthetic polypeptide
MGPDIVMTQSPSSLSASVGDRVTITCRSSTGAVTTSNYASWVQEKPGKLFKGLIGGTNNRAPGVPSRFSGSLIGDKATLTISSLQPEDFATYFCALWYSNHWVFGQGTKVELKRGGGGSGGGGSGGGGSSGGGSEVKLLESGGGLVQPGGSLKLSCAVSGFSLTDYGVNWVRQAPGRGLEWIGVIWGDGITDYNSALKDRFIISKDNGKNTVYLQMSKVRSDDTALYYCVTGLFDYWGQGTLVTVSSYPYDVPDYAGGGGGSGGGGSGGGGSGGGGS

SEQ ID NO: 48 - DNA, 66 bp, Saccharomyces bayanus
ttcttgtcgtacttatagatcgctacgttatttcaattttgaaaatctgagtcctgggagtgcgga

SEQ ID NO: 49 - protein, 605 aa, Homo sapiens
MSGWESYYKTEGDEEAEEEQEENLEASGDYKYSGRDSLIFLVDASKAMFESQSEDELTPFDMSIQCIQSVYISKIISSDRDLLAWFYGTEKDKNSVNFKIYVLQELDNPGAKRILELDQFKGQQGQKRFQDMMGHGSDYSLSEVLWVCANLFSDVQFKMSHKRIMLFTNEDNPHGNDSAKASRARTKAGDLRDTGIFLDLHLKKPGGFDISLFYRDIISIAEDEDLRVHFEESSKLEDLLRKVRAKETRKRALSRLKLKLNKDIVISVGIYNLVQKALKPPPIKLYRETNEPVKTKTRTFNTSTGGLLLPSDTKRSQIYGSRQIILEKEETEELKRFDDPGLMLMGFKPLVLLKKHHYLRPSLFVYPEESLVIGSSTLFSALLIKCLEKEVAALCRYTPRRNIPPYFVALVPQEEELDDQKIQVTPPGFQLVFLPFADDKRKMPFTEKIMATPEQVGKMKAIVEKLRFTYRSDSFENPVLQQHFRNLEALALDLMEPEQAVDLTLPKVEAMNKRLGSLVDEFKELVYPPDYNPEGKVTKRKHDNEGSGSKRPKVEYSEEELKTHISKGTLGKFTVPLKEACRAYGLKSGLKKQELLEALTKHFQD

SEQ ID NO: 50 - protein, 482 aa, Artificial Sequence
  Synthetic polypeptide
MVRSGNKAAWLCMDVGFTMSNSIPGIESPFEQAKKVITMFVQRQVFAENKDEIALVLFGTDGTDNPLSGGDQYQNITVHRHLMLPDFDLLEDIESKIQPGSQQADFLDALIVSMDVIQHETIGKKFEKRHIEIFTDLSSRFSKSQLDIIIHSLKKCDISERHSIHWPCRLTIGSNLSIRIAAYKSILQERVKKTTWDAKTLKKEDIQKETVYCLNDDDETEVLKEDIIQGFRYGSDIVPFSKVDEEQMKYKSEGKCFSVLGFCKSSQVQRRFFMGNQVLKVFAARDDEAAAVALSSLIHALDDLDIWAIVRYAYDKRANPQVGVAFPHIKHNYECLVYVQLPFMEDLRQYMFSSLKNSKKYAPTEAQLNAVDALIDSMSLAKKDEKTDTLEDLFPTTKIPNPRFQRLFQCLLHRALHPREPLPPIQQHIWNMLNPPAEVTTKSQIPLSKIKTLFPLIEAKKKDQVTAQEIFQDNHEDGPTAK

SEQ ID NO: 51 - DNA, 10 bp, Methanobacterium thermoautotrophicum
aatttttgga

SEQ ID NO: 52 - protein, 83 aa, Methanobacterium thermoautotrophicum
GSVIDVSSQRVNVQRPLDALGNSLNSPVIIKLKGDREFRGVLKSFDLHMNLVLNDAEELEDGEVTRRLGTVLIRGDNIVYISP

SEQ ID NO: 53 - DNA, 25 bp, Bacteriophage MS2
gcgcacatgaggatcacccatgtgc

SEQ ID NO: 54 - protein, 116 aa, Bacteriophage MS2
MASNFTQFVLVDNGGTGDVTVAPSNFANGIAEISSNSRSQAYKVTCSVRQSSAQNRKYTIKVEVPKGAWRSYLNMELTIPIFATNSDCELIVKAMQGLLKDGNPIPSAIAANSGIY

SEQ ID NO: 55 - DNA, 26 bp, Bacteriophage PP7
ataaggagtttatatggaaaccctta

SEQ ID NO: 56 - protein, 127 aa, Bacteriophage PP7
MSKTIVLSVGEATRTLTEIQSTADRQIFEEKVGPLVGRLRLTASLRQNGAKTAYRVNLKLDQADWDCSTSVCGELPKVRYTQVWSHDVTIVANSTEASRKSLYDLTKSLVATSQVEDLVVNLVPLGR

SEQ ID NO: 57 - DNA, 19 bp, Unknown
  Shigella phage
ctgaatgcctgcgagcatc

SEQ ID NO: 58 - protein, 62 aa, Unknown
  Shigella phage
MKSIRCKNCNKLLFKADSFDHIEIRCPRCKRHIIMLNACEHPTEKHCGKREKITHSDETVRY

SEQ ID NO: 59 - protein, 1367 aa, Artificial Sequence
  Synthetic polypeptide
DKKYSIGLAIGTNSVGWAVITDEYKVPSKKFKVLGNTDRHSIKKNLIGALLFDSGETAEATRLKRTARRRYTRRKNRICYLQEIFSNEMAKVDDSFFHRLEESFLVEEDKKHERHPIFGNIVDEVAYHEKYPTIYHLRKKLVDSTDKADLRLIYLALAHMIKFRGHFLIEGDLNPDNSDVDKLFIQLVQTYNQLFEENPINASGVDAKAILSARLSKSRRLENLIAQLPGEKKNGLFGNLIALSLGLTPNFKSNFDLAEDAKLQLSKDTYDDDLDNLLAQIGDQYADLFLAAKNLSDAILLSDILRVNTEITKAPLSASMIKRYDEHHQDLTLLKALVRQQLPEKYKEIFFDQSKNGYAGYIDGGASQEEFYKFIKPILEKMDGTEELLVKLNREDLLRKQRTFDNGSIPHQIHLGELHAILRRQEDFYPFLKDNREKIEKILTFRIPYYVGPLARGNSRFAWMTRKSEETITPWNFEEVVDKGASAQSFIERMTNFDKNLPNEKVLPKHSLLYEYFTVYNELTKVKYVTEGMRKPAFLSGEQKKAIVDLLFKTNRKVTVKQLKEDYFKKIECFDSVEISGVEDRFNASLGTYHDLLKIIKDKDFLDNEENEDILEDIVLTLTLFEDREMIEERLKTYAHLFDDKVMKQLKRRRYTGWGRLSRKLINGIRDKQSGKTILDFLKSDGFANRNFMQLIHDDSLTFKEDIQKAQVSGQGDSLHEHIANLAGSPAIKKGILQTVKVVDELVKVMGRHKPENIVIEMARENQTTQKGQKNSRERMKRIEEGIKELGSQILKEHPVENTQLQNEKLYLYYLQNGRDMYVDQELDINRLSDYDVDHIVPQSFLKDDSIDNKVLTRSDKNRGKSDNVPSEEVVKKMKNYWRQLLNAKLITQRKFDNLTKAERGGLSELDKAGFIKRQLVETRQITKHVAQILDSRMNTKYDENDKLIREVKVITLKSKLVSDFRKDFQFYKVREINNYHHAHDAYLNAVVGTALIKKYPKLESEFVYGDYKVYDVRKMIAKSEQEIGKATAKYFFYSNIMNFFKTEITLANGEIRKRPLIETNGETGEIVWDKGRDFATVRKVLSMPQVNIVKKTEVQTGGFSKESILPKRNSDKLIARKKDWDPKKYGGFDSPTVAYSVLVVAKVEKGKSKKLKSVKELLGITIMERSSFEKNPIDFLEAKGYKEVKKDLIIKLPKYSLFELENGRKRMLASAGELQKGNELALPSKYVNFLYLASHYEKLKGSPEDNEQKQLFVEQHKHYLDEIIEQISEFSKRVILADANLDKVLSAYNKHRDKPIREQAENIIHLFTLTNLGAPAAFKYFDTTIDRKRYTSTKEVLDATLIHQSITGLYETRIDLSQLGGD

SEQ ID NO: 60 - protein, 1367 aa, Artificial Sequence
  Synthetic polypeptide
DKKYSIGLAIGTNSVGWAVITDEYKVPSKKFKVLGNTDRHSIKKNLIGALLFDSGETAEATRLKRTARRRYTRRKNRICYLQEIFSNEMAKVDDSFFHRLEESFLVEEDKKHERHPIFGNIVDEVAYHEKYPTIYHLRKKLVDSTDKADLRLIYLALAHMIKFRGHFLIEGDLNPDNSDVDKLFIQLVQTYNQLFEENPINASGVDAKAILSARLSKSRRLENLIAQLPGEKKNGLFGNLIALSLGLTPNFKSNFDLAEDAKLQLSKDTYDDDLDNLLAQIGDQYADLFLAAKNLSDAILLSDILRVNTEITKAPLSASMIKRYDEHHQDLTLLKALVRQQLPEKYKEIFFDQSKNGYAGYIDGGASQEEFYKFIKPILEKMDGTEELLVKLNREDLLRKQRTFDNGSIPHQIHLGELHAILRRQEDFYPFLKDNREKIEKILTFRIPYYVGPLARGNSRFAWMTRKSEETITPWNFEEVVDKGASAQSFIERMTNFDKNLPNEKVLPKHSLLYEYFTVYNELTKVKYVTEGMRKPAFLSGEQKKAIVDLLFKTNRKVTVKQLKEDYFKKIECFDSVEISGVEDRFNASLGTYHDLLKIIKDKDFLDNEENEDILEDIVLTLTLFEDREMIEERLKTYAHLFDDKVMKQLKRRRYTGWGRLSRKLINGIRDKQSGKTILDFLKSDGFANRNFMQLIHDDSLTFKEDIQKAQVSGQGDSLHEHIANLAGSPAIKKGILQTVKVVDELVKVMGRHKPENIVIEMARENQTTQKGQKNSRERMKRIEEGIKELGSQILKEHPVENTQLQNEKLYLYYLQNGRDMYVDQELDINRLSDYDVDHIVPQSFLADDSIDNKVLTRSDKNRGKSDNVPSEEVVKKMKNYWRQLLNAKLITQRKFDNLTKAERGGLSELDKAGFIKRQLVETRQITKHVAQILDSRMNTKYDENDKLIREVKVITLKSKLVSDFRKDFQFYKVREINNYHHAHDAYLNAVVGTALIKKYPALESEFVYGDYKVYDVRKMIAKSEQEIGKATAKYFFYSNIMNFFKTEITLANGEIRKAPLIETNGETGEIVWDKGRDFATVRKVLSMPQVNIVKKTEVQTGGFSKESILPKRNSDKLIARKKDWDPKKYGGFDSPTVAYSVLVVAKVEKGKSKKLKSVKELLGITIMERSSFEKNPIDFLEAKGYKEVKKDLIIKLPKYSLFELENGRKRMLASAGELQKGNELALPSKYVNFLYLASHYEKLKGSPEDNEQKQLFVEQHKHYLDEIIEQISEFSKRVILADANLDKVLSAYNKHRDKPIREQAENIIHLFTLTNLGAPAAFKYFDTTIDRKRYTSTKEVLDATLIHQSITGLYETRIDLSQLGGD

SEQ ID NO: 61 - DNA, 4101 bp, Artificial Sequence
  Synthetic polynucleotide
gacaagaagtacagcatcgggctggcgatcgggaccaactccgtcggctgggctgtgattaccgacgagtacaaggtgccatccaagaagttcaaggtcctcggcaacactgaccggcacagcattaagaagaacctgattggggcgctgctgttcgattcgggggagactgcggaggcgaccaggctgaagcggactgcgcgccggaggtacaccaggaggaagaatcggatctgctacctccaggagattttctcgaatgagatggccaaggtggacgattccttcttccatcgcctggaggagtcgttcctcgttgaggaggacaagaagcatgagaggcatcccattttcgggaatatcgttgacgaggtggcttaccatgagaagtacccgaccatctaccatctgcggaagaagctcgtcgattcgaccgataaggccgacctgcggctgatctacctggccctcgcgcacatgattaagttccggggccatttcctcatcgagggcgacctcaacccggacaactcggacgtggataagctcttcattcagctcgtgcagacatacaaccagctcttcgaggagaatcccattaacgcctcgggggtcgacgctaaggctattctctcggctcggctgtcgaagtcgcgccggctggagaatctcattgcccagctcccaggcgagaagaagaacggcctcttcggcaacctgattgccctgtcgctggggctcacaccgaatttcaagtcgaacttcgacctcgccgaggacgctaagctccagctcagcaaggatacttacgatgatgacctcgataacctgctcgcccagattggggatcagtacgcggatctgttcctcgcggccaagaatctcagcgatgctattctcctgtcggacattctccgcgtcaacacagagattactaaggccccactgtcggcgagcatgattaagaggtacgatgagcatcatcaggacctgacactgctcaaggcgctggtccggcagcagctccccgagaagtacaaggagattttcttcgatcagtcaaagaatgggtacgcgggctacattgatggcggcgcgtcccaggaggagttctacaagttcattaagcccatcctggagaagatggacgggaccgaggagctgctggtgaagctcaatcgggaggacctgctccggaagcagcgcacattcgacaatggctcgattcctcaccagattcacctgggcgagctgcacgccattctccgcaggcaggaggacttctacccgttcctcaaggacaaccgcgagaagatcgagaagatcctgaccttccggattccatactacgtggggccgctcgcgcgggggaactcccggttcgcgtggatgactcgcaagtccgaagaaacgattacaccgtggaatttcgaggaggtcgtcgacaagggcgctagtgcgcagtcattcattgagaggatgaccaatttcgataagaacctgcctaacgagaaggtgctgccgaagcattcgctgctctacgagtacttcaccgtttacaatgagctgaccaaggtgaagtatgtgactgagggcatgaggaagccagcgttcctgagcggcgagcagaagaaggctatcgtggacctgctcttcaagactaaccggaaggtgactgtgaagcagctcaaggaggactacttcaagaagattgagtgcttcgattccgttgagattagcggggtggaggatcggttcaatgcttcgctcgggacataccacgatctcctgaagatcattaaggataaggacttcctcgacaacgaggagaacgaggacattctcgaagatattgtcctgaccctcaccctcttcgaggatcgggagatgatcgaggagaggctcaagacatacgctcatctgttcgatgataaggtcatgaagcagctgaagcgcaggcggtacacagggtgggggcggctgagccggaagctgatcaacgggattcgggataagcagtccgggaagacaattctcgacttcctcaagtccgacgggttcgctaaccggaacttcatgcagctcattcatgatgactcgctgacattcaaggaggatattcagaaggcgcaggtttcggggcagggcgactcgctccacgagcatattgcgaatctggcgggctcccccgcgattaagaagggcattctgcaaaccgtcaaggtggttgatgagctggtcaaggtcatggggcggcataagccagagaatattgtcatcgagatggcgcgggagaatcagaccacacagaaggggcagaagaactcacgggagcggatgaagcgcatcgaggagggcatcaaggagctggggtcgcagatcctgaaggagcatcccgtggagaacactcagctgcaaaatgagaagctgtacctctactacctccagaacgggagggacatgtatgtggatcaggagctggatattaataggctgagcgattacgatgtcgaccacattgtcccacagtcgttcctgaaggacgacagcattgacaacaaggtgctgacccgctcggataagaacaggggcaagagcgataatgttccaagcgaggaggttgtgaagaagatgaagaactactggcggcagctcctgaacgcgaagctcatcacacagcggaagttcgacaacctcaccaaggctgagcgcgggggcctgagcgagctggacaaggcggggttcattaagaggcagctggtcgagacacggcagattacaaagcatgttgcgcagattctcgattcccggatgaacaccaagtacgatgagaacgataagctgattcgggaggtcaaggtaattaccctgaagtccaagctggtgtccgacttcaggaaggacttccagttctacaaggttcgggagatcaacaactaccaccacgcgcatgatgcctacctcaacgcggtcgtggggaccgctctcatcaagaagtacccaaagctggagtcagagttcgtctacggggattacaaggtttacgacgtgcggaagatgatcgctaagagcgagcaggagattggcaaggctaccgctaagtacttcttctactccaacatcatgaacttcttcaagacagagattaccctcgcgaatggcgagatccggaagaggcccctcatcgagacaaatggggagacaggggagattgtctgggataaggggcgggatttcgcgaccgtccggaaggtcctgtcgatgccccaggttaatattgtcaagaagactgaggtccagactggcggcttctcaaaggagtcgattctcccaaagaggaactccgataagctcattgctcggaagaaggattgggaccccaagaagtacgggggattcgactcccccactgttgcttactctgttctggttgttgctaaggtggagaaggggaagtcgaagaagctgaagagcgtgaaggagctgctcgggattacaattatggagaggtcatccttcgagaagaatcccatcgacttcctggaggccaagggctacaaggaggtgaagaaggacctgattattaagctgcccaagtactcgctcttcgagctggagaatgggcggaagcggatgctggcgtccgcgggggagctgcaaaaggggaacgagctggcgctcccctccaagtatgtgaacttcctctacctggcgtcgcactacgagaagctgaaggggtccccagaggataatgagcagaagcagctcttcgtcgagcagcataagcactacctggacgagattatcgagcagattagcgagttctcgaagcgggtcatcctcgcggatgcgaacctggataaggtgctcagcgcctacaataagcaccgggacaagccgattcgggagcaggcggagaatattattcacctcttcacactcaccaacctcggggcaccagctgcgttcaagtacttcgacactactatcgaccggaagcggtacacctcgacgaaggaggtgctcgacgccaccctcattcaccagtcgatcacaggcctgtacgagacacggattgacctgtcccagctcgggggcgac

SEQ ID NO: 62 - DNA, 4101 bp, Artificial Sequence
  Synthetic polynucleotide
gacaagaagtactccattggcctggcgattgggacaaactcggtggggtgggccgtgattacggatgagtacaaggttccaagcaagaagttcaaggtcctcgggaacacagatcggcattcgattaagaagaatctcattggggcgctcctcttcgactcgggggagacagcggaggctaccaggctcaagcggacagccaggcggcggtacacaaggcggaagaatcgcatctgctacctccaggagattttctcgaatgagatggcgaaggtggacgacagcttcttccatcggctggaggagtccttcctggtggaggaggataagaagcacgagaggcatccaattttcgggaacatcgtggacgaggttgcgtaccatgagaagtaccctacaatctaccatctgcggaagaagctggttgactccacagacaaggcggacctgaggctgatctacctcgctctggcccacatgattaagttccgcgggcatttcctgatcgagggggacctgaatcccgacaattcggatgtggacaagctcttcatccagctggtgcagacctacaaccagctgttcgaggagaatcccatcaatgcgtcgggcgttgacgctaaggccattctgtccgctaggctgtcgaagagcaggaggctggagaacctgatcgcccagctgccaggcgagaagaagaatgggctcttcgggaatctgattgcgctctccctggggctgacaccgaacttcaagagcaatttcgatctggctgaggacgcgaagctccagctctcgaaggacacttacgacgatgacctcgataacctcctcgcgcagatcggggaccagtacgctgatctcttcctcgccgctaagaacctctcggatgctatcctgctctccgacattctccgggttaataccgagattacaaaggccccactgtcggcgtccatgatcaagcggtacgatgagcatcatcaggatctcaccctgctcaaggccctcgtgcggcagcagctgcccgagaagtacaaggagattttcttcgaccagagcaagaatgggtacgctggctacattgacggcggggcctcacaggaggagttctacaagttcatcaagccaatcctggagaagatggatgggacagaggagctgctggtgaagctcaaccgggaggatctgctcaggaagcagcggacgttcgacaacgggtcgattccccatcagatccacctgggggagctgcacgcgatcctgcgccggcaggaggatttctaccctttcctgaaggataatcgggagaagatcgagaagattctcaccttccggattccctactacgtcgggccactcgcgcggggcaatagcaggttcgcctggatgacacggaagagcgaggagacaatcaccccctggaacttcgaggaggttgtcgacaagggggcgtccgcccagtcattcattgagcggatgaccaatttcgacaagaatctgccaaatgagaaggttctcccaaagcatagcctcctctacgagtacttcactgtttacaacgagctgaccaaggtgaagtatgtgaccgagggcatgcggaagcccgcgttcctgtccggcgagcagaagaaggccattgtggacctcctgttcaagaccaatcgcaaggtcacagtcaagcagctcaaggaggattacttcaagaagatcgagtgcttcgactcggttgagattagcggggtggaggatcggttcaacgcgagcctcggcacttaccacgacctcctgaagatcatcaaggataaggacttcctcgacaacgaggagaacgaggatattctggaggacatcgtgctcaccctgacgctgttcgaggatcgggagatgatcgaggagcgcctgaagacctacgctcatctcttcgatgataaggtcatgaagcagctgaagaggaggcggtacaccgggtggggccgcctgagcaggaagctcattaacgggatcagggacaagcagagcggcaagaccatcctggacttcctcaagagcgatggcttcgccaaccggaatttcatgcagctcatccacgacgactccctcaccttcaaggaggacattcagaaggctcaggtcagcggccagggcgactcgctgcatgagcacatcgctaacctggcgggcagcccagccatcaagaagggcatcctccagacagtgaaggtcgtggatgagctggtgaaggtcatgggccggcataagcccgagaatattgtgattgagatggcgcgggagaatcagaccactcagaagggccagaagaactcgcgggagcgcatgaagaggatcgaggaggggattaaggagctgggcagccagattctcaaggagcaccccgtggagaatacccagctccagaacgagaagctgtacctctactacctccagaatgggcgggacatgtatgttgatcaggagctggacatcaatcgcctctcggattacgacgtggaccacatcgtgccccagagcttcctgaaggatgatagcatcgacaataaggtcctgacccgctccgacaagaatcgcggcaagagcgacaacgtgccgagcgaggaggtcgtgaagaagatgaagaactactggcggcagctgctgaacgcgaagctcattacacagcggaagttcgataacctgacgaaggcggagaggggcggcctctccgagctggacaaggcgggcttcattaagaggcagctcgtggagactcgccagatcaccaagcacgtggctcagatcctcgatagccggatgaatacgaagtacgatgagaatgacaagctcatccgggaggtgaaggtaatcaccctgaagtcaaagctcgttagcgatttccggaaggacttccagttctacaaggtgcgggagattaacaactaccatcatgcgcacgatgcgtacctcaatgcggtggtgggcacagccctgattaagaagtaccccaagctggagagcgagttcgtctacggggactacaaggtgtacgatgttcggaagatgatcgccaagagcgagcaggagattgggaaggccaccgctaagtacttcttctactcgaatattatgaatttcttcaagaccgagatcacactcgctaatggggagattcggaagcggcccctcatcgagactaacggggagactggcgagattgtgtgggacaaggggcgcgacttcgctaccgtgcgcaaggtcctctcgatgccccaggttaatattgttaagaagacagaggtgcagacgggcgggttctccaaggagtctatcctgccgaagcggaactcggacaagctgatcgcccgcaagaaggattgggaccccaagaagtacgggggattcgatagcccaaccgtggcttacagcgtcctggtggtcgccaaggttgagaaggggaagtcgaagaagctcaagagcgttaaggagctgctgggcatcaccatcatggagcggtccagcttcgagaagaatcctatcgacttcctggaggctaaggggtacaaggaggtcaagaaggacctgatcattaagctgcccaagtactctctgttcgagctggagaacgggaggaagcggatgctggcgtctgctggcgagctacagaagggcaatgagctggcgctcccctcgaagtatgtcaacttcctctacctggcttcccattacgagaagctgaagggctcgcccgaggataatgagcagaagcagctcttcgtggagcagcacaagcactacctcgacgagatcattgagcagatttcggagttctcgaagcgggtcattctcgcggacgcgaacctcgacaaggtcctctcggcgtacaacaagcaccgggacaagcccatccgggagcaggccgagaacattatccacctcttcacactgaccaacctcggcgctcccgccgcgttcaagtacttcgacaccaccattgaccgcaagagatacacatccaccaaggaggtgctggacgcgaccctcatccaccagagcatcacaggcctctacgagacacggatcgacctctcgcagctcgggggcgat

SEQ ID NO: 63 - DNA, 4092 bp, Artificial Sequence
  Synthetic polynucleotide
gacaagaagtactcgatcggcctggcgattggcacaaacagcgtggggtgggctgtgatcactgatgagtacaaggtgccatcgaagaagttcaaggtgctggggaatacagaccggcattcgatcaagaagaatctcattggcgctctcctcttcgattccggcgagactgctgaggcgacccgcctgaagcgcaccgcccggcggcgctacactcggcggaagaataggatttgctacctccaggagattttctcgaatgagatggccaaggtggatgacagcttcttccaccgcctggaggagtcgttcctggtcgaggaggacaagaagcatgagcggcaccctatcttcgggaatatcgttgatgaggtcgcctaccacgagaagtaccccactatctaccatctccgcaagaagctcgtggacagcacagataaggccgacctccgcctgatctacctcgccctcgcgcacatgattaagttccgggggcacttcctcattgagggggatctgaatcccgataactccgacgtggacaagctgttcatccagctggtgcagacatacaaccagctgttcgaggagaatcccatcaacgcgagcggcgtggacgctaaggccattctgtcggctaggctctcgaagtcgaggcggctggagaacctgattgcgcagctccccggcgagaagaagaacgggctgttcgggaatctcatcgccctctccctcggcctcacaccaaacttcaagagcaatttcgacctggctgaggacgctaagctgcaactctcaaaggatacatacgatgacgacctggacaatctcctggctcagatcggcgaccagtacgctgacctgttcctcgcggccaagaatctgtcggacgcgattctcctcagcgacatcctgcgcgtcaataccgagattacgaaggctccactgtctgcgtcaatgattaagcggtacgatgagcatcaccaggatctgaccctcctgaaggcgctcgtgcggcagcagctgcccgagaagtacaaggagattttcttcgatcagagcaagaatggctacgccggctacatcgacgggggcgcgagccaggaggagttctacaagttcatcaagcccatcctggagaagatggacggcaccgaggagctactcgtgaagctcaatcgggaggatctcctccggaagcagcggacattcgataacgggtctatcccacaccagatccacctcggcgagctgcatgcgattctgcggcggcaggaggatttctaccctttcctgaaggacaaccgggagaagatcgagaagatcctcacattccggattccatactacgtcggccccctggcgaggggcaatagccggttcgcgtggatgacaaggaagtccgaggagactattaccccgtggaatttcgaggaggtggttgacaagggcgcttccgcgcagagcttcattgagcggatgacaaacttcgacaagaatctccccaacgagaaggtcctgccgaagcatagcctcctgtacgagtacttcaccgtctacaatgagctaactaaggtcaagtatgtgacagagggcatgaggaagccagccttcctctcaggcgagcagaagaaggccattgtggacctcctgttcaagacaaaccgcaaggtgacagtgaagcagctgaaggaggattacttcaagaagattgagtgcttcgactcagtggagatttcaggcgtggaggatcggttcaacgcgagcctggggacttaccacgacctgctgaagattattaaggacaaggacttcctggataacgaggagaatgaggacatcctggaggatattgtgctcaccctcaccctgttcgaggacagggagatgattgaggagaggctcaagacctacgcgcacctgttcgatgacaaggtcatgaagcagctgaagaggcggcgctacactgggtggggccgcctgtcgcggaagctgatcaacggcattcgggataagcagtccgggaagaccattctggatttcctgaagtcggacggcttcgccaacaggaatttcatgcagctgatccacgacgactccctcaccttcaaggaggacattcagaaggcccaggttagcggccagggggactcactccacgagcatattgccaatctggccggctctccagctatcaagaagggcatcctgcaaacagttaaggttgttgacgagctggttaaggtcatggggcggcataagcccgagaacattgtcatcgagatggctcgggagaaccagacaactcagaagggccagaagaactccagggagcgcatgaagcggattgaggagggcattaaggagctggggtcccagatcctcaaggagcaccctgtcgagaacactcagctgcaaaacgagaagctctacctgtactacctccagaacgggcgggatatgtatgtggatcaggagctggacatcaacaggctctccgactacgacgtggatcacattgtcccacagtctttcctcaaggatgattccatcgacaacaaggtgctgacgcgcagcgacaagaatagggggaagtcggacaacgttccgagcgaggaggtcgtgaagaagatgaagaattactggaggcagctcctgaatgcgaagctgatcactcagaggaagttcgacaatctgacaaaggcggagaggggcgggctctcggagctggataaggcgggcttcatcaagcggcagctcgttgaaacccggcagatcaccaagcatgtcgcccagatcctcgatagccgcatgaacaccaagtacgatgagaacgacaagctcattcgggaggttaaggtcattacgctgaagtccaagctcgtcagcgacttcaggaaggatttccagttctacaaggttcgggagattaacaactaccaccacgcgcatgatgcgtacctgaacgctgttgtcggcactgctctcatcaagaagtacccaaagctggagtccgagttcgtctacggggactacaaggtctacgatgtccggaagatgatcgccaagtcggagcaggagatcgggaaggctactgcgaagtacttcttctacagcaacattatgaatttcttcaagacggagattacgctggcgaacggggagattaggaagaggcccctcattgagactaatggggagacaggcgagattgtttgggacaagggccgcgacttcgcgactgtgcggaaggtcctgtccatgccacaggtgaatattgttaagaagacagaggtgcagactgggggcttctcgaaggagagcattctcccaaagcggaacagcgataagctcatcgcgcgcaagaaggattgggaccctaagaagtacggcggcttcgattctcccactgtggcctactccgttctcgtggttgccaaggttgagaaggggaagtcgaagaagctgaagtcggtcaaggagctgctcgggattacaatcatggagcggagcagcttcgagaagaaccctattgatttcctggaggccaagggctacaaggaggttaagaaggatctcattatcaagctccctaagtactctctgttcgagctggagaatggccggaagaggatgctggcctcggctggcgagctacagaaggggaatgagctggccctcccgtcgaagtatgtgaatttcctgtacctcgcgtcgcactacgagaagctcaagggcagcccggaggataatgagcagaagcagctcttcgtggagcagcataagcactacctggacgagatcattgagcagatcagcgagttctcgaagcgggttattctggctgatgctaacctggacaaggttctgagcgcctacaataagcatcgcgacaagccgattcgcgagcaggcggagaatattatccacctgttcaccctcactaacctcggggctcccgcggccttcaagtacttcgataccacaatagataggaagcggtacacctcgacgaaggaggtcctcgacgccacactcatccatcagtcgattacaggcctgtacgagacacggattgacctctcgcagctg

SEQ ID NO: 64 - DNA, 4101 bp, Artificial Sequence
  Synthetic polynucleotide
gacaagaagtattccataggcctggctatcggcaccaacagcgtgggctgggccgtcatcaccgacgagtacaaagtgccgagtaaaaagttcaaagtgctcggcaacaccgaccgccactccataaagaaaaacctgatcggggcgctcctgttcgacagcggcgagacggcggaggccacccgcttgaaacgcacggcccgacggcgctacacgcggcgcaagaaccggatctgttacctacaggagattttctctaacgagatggcgaaggtggacgactcgttctttcaccgcctcgaagagtccttcctcgtggaggaggacaagaaacacgagcgccacccgatcttcggcaacatcgtggacgaggtggcctaccacgagaagtacccgaccatctaccacctccggaagaaactcgtggacagcacggacaaggccgacctgaggctcatctacctcgccctggcgcacatgattaagttccggggccacttcctgatcgagggcgacctgaacccggacaacagcgacgtggacaagctgttcatccagctagtccagacctacaaccagcttttcgaggaaaaccccatcaacgccagcggggtggacgcgaaggcgatcctgtccgcccggctgagcaagtcccggcggctggagaacctcatcgcgcagttgcccggcgagaagaagaacgggctgttcgggaacctgatcgccctctccctggggctcaccccgaacttcaagtccaacttcgacctcgccgaggacgccaaactacagctgagcaaggacacctacgacgacgacctcgacaacctgctggcccagatcggggaccagtacgcagacctgttcctcgccgccaagaacctctccgacgccatcctgctgtcggacatcctgcgggtgaacacggagatcacgaaggccccgctctcggcctcgatgattaaacgctacgacgagcaccaccaggacttgaccctcctcaaggcgctggtccgccagcagcttcccgagaagtacaaggaaatctttttcgatcagagcaagaacgggtacgccgggtacatcgacggcggggcgtcccaggaggagttctacaagttcatcaagcccatcctggagaaaatggacgggaccgaggagctgctcgtgaagctcaaccgcgaagatttgctccgcaagcagcgcacgttcgacaacgggtcgatcccgcaccagatccacctgggcgagctgcacgcgatcctcaggcgtcaggaagacttctaccccttcctcaaggacaaccgcgagaagatagagaagattctgaccttcagaattccttattacgtgggcccgctggctcggggcaactcgcgcttcgcctggatgacgcgcaagtccgaggagaccatcaccccgtggaacttcgaggaggtggtggataagggtgcctcggcccagtccttcatcgagcggatgaccaacttcgacaagaacctgccgaacgagaaggtgctccccaagcacagcctgctctacgaatatttcacggtgtacaacgagctgacgaaggtcaagtacgtgaccgagggaatgaggaaacctgcattcctctccggggagcagaagaaagccatagtcgacctcctgttcaagaccaaccggaaggtcaccgtcaagcagctcaaggaggactacttcaagaagatcgagtgcttcgattcagtggagatcagcggcgtcgaggaccggttcaacgccagcctgggcacctaccacgacctgctcaagatcatcaaggacaaggacttcctcgacaacgaggagaacgaggacatcctggaggacatcgtgctgaccctgacgctcttcgaggaccgcgagatgatcgaggagcgcctcaagacctacgcccacctgttcgacgacaaggtgatgaagcagctcaagcggcggagatatactgggtggggccgcctctcccggaagctcattaacggtatcagggataagcagtccgggaagacgatcctcgacttcctcaagtcggacgggttcgccaaccgcaacttcatgcagctcatccacgacgactccctgacgttcaaggaggacatccagaaggcccaagtgtctggtcaaggtgactcgctccacgagcacatcgccaacctcgcgggcagcccggccatcaagaagggaatactccagaccgtcaaggtggtggacgagctggtgaaggtcatgggccgccacaagccggagaacatcgtcatcgagatggcgcgggagaaccagaccacgcagaaggggcagaaaaatagccgtgagcgcatgaagcgcatcgaggaggggattaaggagttgggcagccagatcctcaaggagcaccctgtggagaacacgcagttgcaaaacgagaagctctacctgtactacctccagaacgggagggatatgtacgtggaccaagaactggacatcaaccgcctgtccgactacgacgtggaccacatcgtgccgcagagcttcctcaaggacgacagcatcgacaacaaggtgctcacccggtccgacaagaatcggggcaagtccgacaacgtgcccagcgaggaggtcgtcaaaaagatgaaaaactactggcgacaactactgaacgccaagctcatcacccagcgcaagttcgacaacctcacaaaagccgagcgcggcgggttgagcgagctggacaaggccgggttcatcaagcgccagctcgtcgagacgcgccagatcacgaagcacgtcgcgcagatactcgacagccggatgaacaccaagtacgacgagaacgacaagctcatccgggaggtgaaggtcatcaccctcaagtcgaagctcgtgagcgacttccgcaaggacttccagttctacaaggtccgggagatcaacaactaccaccacgcccacgatgcttatcttaacgccgtggtggggacggccctcattaagaaatacccgaagctggagtcggagttcgtgtacggcgactacaaggtgtacgacgtcaggaagatgatcgccaagtccgaacaggagatcgggaaggccacggcgaaatacttcttctacagcaacatcatgaacttcttcaagaccgagatcaccctcgccaacggcgagatccgcaagcgcccgctcatcgagacgaacggggagaccggcgagatcgtctgggacaaggggcgcgacttcgccactgtgcggaaggtgctgtcgatgccccaggtcaacatcgtcaagaagacggaggtccagacgggcgggttcagcaaggagagcatcctgccgaagcgcaacagcgacaagctgatcgcccgcaaaaaggactgggatccaaaaaagtacggcggcttcgacagccccaccgtcgcctacagcgtcctcgtcgtcgctaaagtcgagaagggcaagtccaaaaagctcaagagcgtcaaggagctgctcgggatcaccatcatggagcggtccagcttcgagaagaacccaattgatttcctggaggcgaagggctacaaggaggtcaagaaagacctcatcataaagctgccgaagtactcactcttcgagctggagaacgggcgcaagcggatgctggcgtcggccggagagctccaaaagggcaacgagctggcgctgccgagcaagtacgtgaacttcctctacctggcgtcccactacgagaagctcaagggcagtccagaggataacgagcagaagcagctattcgtggagcagcacaagcactacctggacgagatcatcgagcagatcagcgagttctccaagcgcgtcatcctggcggacgccaacctggacaaggtgctgtccgcgtacaacaagcaccgcgacaagccgatccgcgagcaagccgagaacatcatccacctgttcaccctcacgaacctcggggcacccgccgccttcaaatatttcgacacgaccatcgaccgcaagcgctacaccagcacgaaggaggtgctcgacgccaccctgatccaccagagcatcaccgggctgtacgagacccgcatcgacctctcgcagctcggcggggac

SEQ ID NO: 65 - DNA, 4101 bp, Artificial Sequence
  Synthetic polynucleotide
gacaagaagtacagtattggattggccatcgggacgaacagcgtgggctgggccgtcatcaccgacgagtacaaggtgccatccaagaagtttaaggttctggggaataccgaccgccactcgatcaagaaaaatctcatcggggcgctgcttttcgacagcggcgagacggcggaagcgacgcggctcaagcggacggctcgtcgccgttacacccggcgtaagaaccgcatctgttacctccaggagatattcagcaacgagatggcgaaggtggacgactcctttttccaccgtcttgaggagtccttcctggtcgaggaggacaagaagcacgagcgccacccgatcttcgggaacatcgtggacgaggtggcctaccacgagaagtaccccacgatctaccacctccgcaaaaaactcgtggactcaactgacaaggccgatttgaggcttatctacctcgccctcgcccacatgattaagttccgtgggcacttcctaatcgagggtgacctcaaccccgacaactctgacgtggacaagctgttcatccagcttgtgcagacctacaatcagctctttgaggagaatccgatcaacgcatctggtgtggacgcaaaggccatcctcagcgcgcggctgagcaagtctaggcggttggagaacctgatcgcccaactgcccggcgagaagaaaaatggcctcttcggcaacctgatcgccctgtcgctggggctcacgccgaacttcaagagtaactttgacctggcggaggacgctaagctccagctatctaaggacacatacgacgacgacctggacaacctgctggcccagatcggcgaccagtacgccgacctcttcctagccgccaagaacctgtccgacgccatcctcctcagcgacatcctgcgcgtgaacacggagatcacgaaggctccgctcagcgcctccatgattaagcggtacgacgagcaccaccaagacctaactttactcaaagccctcgtgcggcagcagcttcccgagaagtacaaagagatattttttgatcagtccaagaacggttatgcgggctacatcgacggcggcgcgagccaggaggagttctacaagttcatcaagcccatcctggagaagatggacggcacggaggagctgctcgtgaagctcaaccgtgaagacctcctgcgaaagcagcgaaccttcgacaacggttcgatcccgcaccagatccacctcggggagctgcacgccatcctgaggcgacaggaggacttctaccctttcctaaaggacaaccgcgagaagattgaaaaaatcctgacgtttcgcataccctactacgtcggcccgctggcgcgcggcaactcccggttcgcctggatgacccgtaagagcgaggagacgatcaccccgtggaacttcgaggaggtcgtggacaagggcgcgagcgcgcagagcttcatcgagcgcatgaccaacttcgacaagaacctcccgaacgagaaggtgctcccaaagcactccctcctgtacgagtatttcaccgtgtacaacgagttgacaaaggtgaagtacgtgacggagggaatgcggaagcctgcgttcctctcgggcgagcagaagaaggcaatcgtggacctgctcttcaagaccaaccggaaggtgacggtgaagcagctcaaggaggactacttcaaaaaaatcgagtgcttcgactccgtggagataagcggcgtggaggaccgattcaacgcctccctcggcacctaccacgacctccttaagatcatcaaggacaaggacttcctggacaacgaggagaacgaggacatcctggaggacatcgtgctcaccctgaccctcttcgaggaccgggagatgatcgaggagcgcctcaagacgtacgcccacttgttcgacgacaaggtgatgaagcagctcaagcggcggcgatacaccgggtggggccgcctatcccgcaaacttatcaacggcatccgcgacaagcagtccggcaagacgatcctggatttcctcaagtcggacgggttcgccaaccggaacttcatgcagctcatccacgacgacagcctcacgttcaaggaggacatccagaaggcccaagtgagcggtcaaggggacagcctccacgagcacattgcgaaccttgctgggagccctgcgatcaagaaggggatattgcaaaccgtgaaggtcgtggacgagttggtgaaggtcatggggcgacacaagcccgagaacatcgtgatcgagatggccagggaaaatcagaccacgcagaagggccaaaaaaacagccgcgagcggatgaagcggatcgaggagggcatcaaggagctggggtcgcagatcctcaaggagcacccggtggagaacacgcagctccagaacgagaagctgtacctctattacctacagaacgggcgggatatgtacgtggaccaggagctagacatcaaccgcctgtccgactacgacgtggaccatatcgtcccgcagtcgttcttgaaggacgacagcatcgacaacaaggtgctcacaagatcggataagaatcgaggcaagtccgacaacgtgccctcggaggaggtggtcaagaaaatgaaaaactactggcggcagttgctgaacgccaagctcattacgcagcggaagttcgacaacctgacgaaggctgaacgtggtgggctcagcgagctagacaaggcggggttcatcaagcggcagctcgtcgagacccggcagatcaccaagcacgtggcgcagatcctggactcgcgcatgaacaccaagtacgacgagaacgacaagctcatccgtgaggtgaaggtcatcacccttaagtctaagctggtcagtgacttccgcaaggacttccagttctacaaggtccgggagatcaacaactaccaccacgcgcacgacgcctacctcaacgcggtggtggggacggcgcttattaagaaatatcccaagctggaaagcgagttcgtttacggcgactacaaggtgtacgacgtccgcaagatgatcgcaaagtcggaacaggaaatcggaaaggcgacggccaaatatttcttttactccaacatcatgaatttttttaagacggagatcaccctggcgaacggggagatccgcaagcggcccctcatcgagaccaacggggagacgggcgagatcgtctgggacaagggccgggacttcgccaccgtgcggaaggtgctttctatgcctcaagtcaatatcgtcaaaaagacagaggtgcagaccggcgggttcagcaaggagtctatcctgccgaagcgcaactcggacaagctcatcgcgcgcaagaaagactgggaccccaaaaaatatggcgggttcgactcgccgaccgtcgcctacagcgtcctcgtggtggctaaggtcgagaagggcaagagcaaaaagctaaagtcggtgaaggagctgctgggcatcaccatcatggagcgctcgtctttcgagaagaatccaatcgacttcctagaggcgaaggggtacaaggaggtcaaaaaggatcttatcatcaaactgccgaagtacagtctgttcgagctggagaacgggcggaagcggatgctggctagtgcgggcgagttgcagaagggcaacgagttggcactgccctccaagtacgtgaacttcctgtacctggcctcccactacgagaagctcaaggggagccccgaggacaacgagcagaagcagctattcgtcgagcagcacaagcactacctggacgagatcatcgagcagatcagtgagttctccaagcgggtcatcctcgcggacgccaacctggacaaggtgctgagcgcgtacaacaagcacagggacaagccaatcagggaacaggccgagaacatcatccacctgttcaccctgaccaacctgggtgcaccggctgccttcaagtactttgacacgaccatcgaccggaagcgctacacctccacgaaggaggtgctggacgccacgctgatccaccagagcatcaccgggctctacgagacacggatcgacctgagccagcttggcggggac

SEQ ID NO: 66 - DNA, 4092 bp, Artificial Sequence
  Synthetic polynucleotide
gacaaaaagtattccattggactcgctatcggcacgaacagcgtcgggtgggcggtcatcactgacgagtacaaggtgccgagcaagaagtttaaggtgctgggaaacaccgacaggcactcgatcaagaaaaatcttatcggggccctactcttcgactccggagaaaccgccgaggccacccggttgaagcgcacggcccgccgtcgctacaccaggcgcaagaaccggatctgctacctccaggagatattcagcaatgagatggcgaaggtggacgactcgttttttcacaggctagaggagtctttcctcgtggaggaggacaagaaacacgagcgccaccccatcttcggcaacatcgtggatgaggtggcatatcacgagaagtacccaaccatctaccacctccgcaaaaagctcgtggactctaccgacaaggccgacctccgtctgatctacctcgcgctggcccacatgattaagttccgaggacactttctgatcgagggcgacctgaacccagacaacagcgacgtggacaagctgttcatccaacttgtccagacctacaatcagctcttcgaggagaaccctatcaacgcctcgggcgtggacgcgaaggccatcctgtccgcccgcctgagcaagtcgcggcggctggagaacctgatcgcccagctccccggcgaaaaaaagaacggcctcttcggcaacctcatcgcgttgtcgctggggctcaccccgaacttcaagtccaacttcgacctggccgaggacgctaaactccagctctcgaaggatacctacgacgacgacctcgacaacctgctggcccagatcggcgaccagtacgcggaccttttcctggcggccaagaacctgagcgacgcgatcctccttagcgacatactccgtgtgaacaccgagatcacgaaggccccgctctccgcgtccatgattaagcgctacgacgagcaccaccaagaccttaccctgcttaaggcgctggtcaggcagcagttaccggagaagtacaaggagatcttttttgatcaatctaagaacggttacgccgggtacatcgacggcggcgcgtcccaggaggagttctacaagttcatcaagccgatcttggagaaaatggacgggaccgaggagctgctcgtgaagctcaaccgcgaagacctcctccgcaagcagcgcaccttcgacaacgggagcatcccgcaccagatccacctgggagagctgcacgcgatcctgcggagacaagaggacttctaccccttcctcaaggacaaccgggagaagattgaaaaaatacttacttttcgtatcccgtactacgtcgggccccttgcgaggggcaactccagattcgcgtggatgacccgcaagtccgaggagaccatcaccccgtggaacttcgaggaggtggtggacaagggcgcgtcggcccagtcgttcatcgagcgcatgaccaacttcgacaagaaccttccgaacgagaaggtgctcccgaagcacagcctgctctacgaatattttactgtgtacaacgagctgacgaaggtcaagtacgttacggaggggatgaggaagcccgccttcctctccggcgagcagaagaaagccattgtggatctcctgttcaagaccaaccgcaaggtgacggtgaaacagctcaaagaggactacttcaagaagatcgagtgcttcgactccgtagagatcagcggggtcgaggaccgcttcaacgcctcgctgggcacgtaccacgacctgctaaagattatcaaggacaaagacttcctagacaatgaggagaacgaggacattctggaggacatcgtgctgactctgacgctgttcgaagaccgcgagatgatcgaggagcggcttaagacgtacgcccacctgttcgacgacaaggtgatgaagcagttgaaacggcggcgctacaccgggtggggccgcctctcccgcaagctcatcaacggcatccgcgacaagcagtcggggaagacgatcctggacttcctcaagagcgacggcttcgccaaccgaaacttcatgcagctaatccacgacgacagcctgacgttcaaggaggacatccagaaggcccaagtgagcggccagggagactcgctacacgagcatatcgccaacctggctggcagcccggcgattaagaaaggaatcctccaaaccgtcaaagtggtggacgagctggtgaaggtgatgggccgccacaagcccgagaacattgtgatcgagatggcgcgggagaaccagacgacgcagaagggccaaaaaaatagcagggaaaggatgaagcgaatagaggaggggatcaaggagctggggagccagattctcaaagagcacccggtcgagaacacacagctccagaacgagaagctgtacctctactacctccaaaacggccgcgatatgtacgtggaccaggaactagacatcaaccggctgagcgactatgacgtggaccacatcgtgccgcagtccttcctcaaggacgactcgattgacaacaaagtgctcactagatccgacaagaacagaggcaagagcgataacgtcccgtcggaggaggtcgtcaagaaaatgaaaaactactggcggcagctcctaaacgccaagctcatcacgcagcgtaagttcgacaacctgacgaaggcggagcggggcgggctgagcgagctggacaaagcggggttcatcaagcggcagctcgttgagacgcggcagatcacaaagcacgtcgcgcaaatcctcgactcccgcatgaacaccaagtacgacgagaacgacaagctcatccgggaggtgaaggtcattacccttaaatcgaagctcgtcagcgactttcgtaaggacttccagttctacaaggtcagagagatcaacaactaccaccacgcccacgacgcctatctgaacgccgtggtgggcaccgcgcttattaagaagtaccccaagctggagtccgagttcgtgtacggcgactacaaggtttatgacgtcaggaagatgatcgccaagtcggaacaggagatcggaaaagctaccgccaaatatttcttctatagcaacatcatgaacttcttcaaaaccgagatcaccctcgccaacggcgagatccggaagcgcccgctcatcgagaccaacggggagaccggggagatcgtctgggacaaggggcgggacttcgctactgtccgaaaggtgctctccatgccacaagtgaatatcgtcaagaaaacagaggtgcagaccggagggttcagtaaggagtccatcctgcccaagcggaactccgacaagctaattgctcgcaaaaaggattgggatcctaaaaaatatggcggcttcgactcgcccacggtcgcctactctgtgctggtcgtggcgaaggtggagaagggcaagtccaagaagctcaagagcgtcaaggagctgctggggatcacgatcatggagcgtagttcgtttgagaagaatcccatcgacttcctggaggctaagggctacaaggaggtcaaaaaggacctcatcattaagctgccgaagtacagcctcttcgagctggagaacgggcggaagcgtatgctcgcctccgctggggagttacaaaaggggaacgagctggcgctgccgtctaagtacgtcaacttcctgtacctggcctcccactacgagaagctcaaggggtcgccggaggacaacgagcagaagcagctcttcgtagagcagcacaagcactacctggacgagatcatcgagcagatttcagagttctcaaagcgggtcatcctcgccgacgccaacctggacaaggtgctctcggcctacaacaagcaccgggacaagccgatccgcgaacaggccgaaaacatcatccacctgttcacgctcaccaacctcggtgccccggcggccttcaagtactttgacacgaccatcgaccggaagcgctatacctcgacgaaggaggtgctggacgccaccctgatccaccagtccatcaccgggctttacgagacccggatcgacctctcgcagcta

SEQ ID NO: 67 - DNA, 4101 bp, Artificial Sequence
  Synthetic polynucleotide
gacaagaagtatagtattggactcgccatcggaaccaactctgtggggtgggctgttattacagatgaatataaggtgccatccaaaaagtttaaagttctgggcaatactgatagacactcaatcaagaagaatctgataggtgcacttctgtttgatagtggagagactgccgaggcaaccagacttaaaaggactgcaagaagaagatataccagaagaaagaataggatttgctatttgcaggaaatcttcagcaacgaaatggccaaggttgatgactcatttttccataggttggaggagagttttcttgtggaggaagataagaagcacgaaagacacccaattttcgggaatatagtggacgaggtggcttatcatgagaagtatcccactatctaccacctgagaaagaaacttgtggactcaaccgataaggctgatcttaggcttatatacttggcccttgcacatatgatcaaattcaggggccattttcttatcgaaggcgatcttaatcccgataactcagatgtggacaagctgtttatacaacttgtgcaaacctacaatcaactcttcgaggagaatcccattaacgcctccggcgtggatgcaaaagccatactgtcagccagactgagcaaaagtaggagactggagaatcttatagcccaactgcccggtgaaaagaagaatgggctcttcggaaatctgatcgctctttcattggggttgacacccaactttaagagtaactttgacttggcagaagatgcaaagttgcagctcagtaaagacacatatgacgatgaccttgacaatctcttggcacaaataggggatcaatacgctgaccttttcctcgctgccaagaacctcagcgacgctatactgttgtccgacattcttagggttaataccgaaattacaaaggcccctcttagtgcaagtatgatcaaaaggtatgatgagcatcaccaagaccttacactgctgaaggctctggttagacagcaactccctgaaaagtataaggaaatattcttcgaccaaagtaagaacgggtacgccggttatattgatgggggcgcaagtcaagaagaattttacaaattcatcaagccaattcttgaaaagatggacgggactgaggaattgctggtgaaactgaatagagaggaccttcttagaaaacagaggacatttgacaatgggtccatcccacaccagattcatctgggggaactccacgcaatattgaggagacaagaagacttttacccattccttaaggataatagagagaaaatcgaaaaaatcctgactttcaggattccttactatgttgggccactggccagggggaactcaagattcgcttggatgacaaggaagtcagaagaaaccataaccccttggaattttgaagaggtggttgataagggggcatcagcccagtctttcatagagaggatgaccaactttgataaaaatcttccaaatgagaaggttttgccaaaacatagtcttttgtacgagtactttactgtttataacgaattgaccaaggtgaagtatgtgaccgagggaatgaggaagccagcatttttgtccggggagcaaaagaaagcaatcgttgatcttctcttcaagaccaacagaaaagtgaccgtgaaacaactgaaggaagactacttcaaaaagatagaatgtttcgattcagtggaaattagcggtgttgaagacaggttcaatgcttcattgggtacttaccacgacctgttgaagataatcaaagacaaggactttctcgataatgaggagaacgaagacatcttggaagacattgtgcttacactcactttgtttgaggacagggaaatgattgaggaaagactcaaaacttacgctcatttgtttgatgataaggttatgaaacaactaaaaagaagaaggtacaccggctggggaagattgagtaggaaactgatcaacggtattagagataaacaatccggaaagactatcctcgatttccttaagagtgatggctttgcaaataggaattttatgcagctgattcatgacgactcacttaccttcaaagaagacatccaaaaagctcaggtgtctgggcaaggcgacagtctgcatgaacatatagctaacttggctgggagtcccgccatcaagaaggggatacttcaaacagttaaagttgtggacgaattggtgaaggtaatgggaaggcacaagcctgaaaatatagtgatagaaatggcaagggaaaatcaaacaacccagaagggacagaagaacagtagggaaaggatgaaaaggatagaagaggggatcaaagagcttggtagccagatcctcaaggaacatccagtggagaatacccaacttcaaaacgagaaactctatttgtactacttgcagaacggaagagatatgtatgtggaccaagagcttgatattaacaggctgagcgattatgacgttgaccacatagtgccccaatcattcctcaaggatgactctattgataataaggtgctgacaaggagtgacaagaatagagggaaatccgacaacgttccatccgaggaagttgtgaagaagatgaagaactactggaggcagttgctgaacgctaagctcattacccagaggaaattcgataacctgaccaaagcagagagaggcgggctgagcgaactcgataaagcaggtttcatcaagagacaactcgtggagactaggcaaattactaagcacgtggctcaaatactcgacagcaggatgaacacaaagtacgacgagaacgacaagctcattagagaggttaaggttattactctgaaaagtaaattggttagcgatttcagaaaggatttccaattctataaggttagagagatcaacaattatcatcatgcacatgatgcctatctgaatgctgtggttggtacagcccttatcaagaagtaccctaagctagagagcgagtttgtgtacggagattataaggtgtatgatgtgaggaaaatgatcgctaaaagtgagcaagagattggaaaggctaccgccaaatacttcttttattccaatattatgaatttcttcaagacagaaatcaccctggctaacggcgagataaggaagaggccgcttatcgaaactaatggggagacaggcgaaatagtgtgggacaaagggagggatttcgcaactgtgaggaaggttttgagcatgcctcaggtgaatatcgttaagaaaaccgaagttcaaactggagggttctctaaggaaagcattctccccaagaggaactccgacaagctgattgctagaaagaaagactgggaccccaagaagtatggcggattcgactcacccactgtggcatatagcgttctcgtggtggcaaaggttgaaaagggtaaatccaaaaaactcaaatccgtgaaggaactccttggcataactattatggaaaggagtagctttgaaaagaatcccatcgactttctcgaagctaagggctataaggaagttaagaaggaccttataatcaaacttccaaaatactccctttttgagttggaaaacggcagaaagagaatgttggccagtgccggggagcttcaaaagggcaacgaactggctctgcctagcaaatatgtgaactttttgtatctggcatcacactacgagaaacttaaaggctctcctgaggacaacgagcaaaaacagctctttgttgaacagcataagcactacctcgacgagattattgagcagatcagcgagttctcaaagagagttattctggctgacgctaatcttgacaaggttttgtccgcttacaacaaacacagggataagccaatcagggagcaggcagaaaacataatccatctctttaccctgacaaacctcggtgcccccgctgctttcaagtattttgatactaccattgacaggaagagatatacttccactaaggaagtgctcgacgcaaccctcatacaccaaagtatcacaggcctctatgaaactaggatagatttgtctcaacttgggggcgat

SEQ ID NO: 68 - DNA, 4101 bp, Artificial Sequence
  Synthetic polynucleotide
gacaaaaagtattccatcgggcttgctatcggaaccaactctgtggggtgggcagttattaccgacgaatacaaggtgcccagcaagaagtttaaggttctggggaacacagatagacatagcataaagaaaaacctgataggcgcactgttgttcgactccggggaaacagccgaagctaccaggctgaagagaactgcaagaagaaggtacaccagaagaaaaaacagaatatgttatctccaagagattttctctaacgagatggccaaggtggacgactcattctttcacagactggaagaatctttccttgtggaagaagataagaaacacgagaggcaccctatttttggcaatatcgtggatgaggtggcttaccacgaaaaataccctacaatataccacctcaggaaaaaattggttgatagtacagacaaggccgacctcaggctcatctatttggccctggcccatatgattaaattcagggggcactttctcatcgagggagatttgaaccccgacaacagtgatgttgataagctctttattcagctcgtgcagacttacaatcagttgtttgaggaaaaccccattaatgcttccggggtggacgccaaggcaatcctttctgcaagactctcaaagtcaaggagactcgaaaatctgatagcacagcttccaggagagaagaagaacgggctctttggaaacctgatcgctctgtcactcggactcacacccaatttcaaaagcaattttgatttggcagaggacgctaagctgcaactcagtaaggatacctacgacgatgacttggataatctgctcgcacaaattggggaccagtatgcagacctgtttctcgcagctaagaacttgagtgacgccatattgctcagtgacatcctcagggttaataccgagattacaaaagctccactctctgcaagcatgatcaagaggtatgacgagcaccatcaagacctgacactccttaaggcgttggttaggcagcaacttcctgaaaagtataaggaaatcttcttcgatcaaagcaaaaacggctacgccggctatatagacgggggagcatcccaagaagaattttataagttcataaaacctatattggagaagatggacgggacagaggaattgctcgtgaaactgaacagggaggatctcctcaggaagcaaaggaccttcgacaatggctccatcccacatcagattcacctcggcgaactgcacgcaatactgagaagacaagaggacttttatcctttcctgaaggacaacagggagaaaatcgagaaaatcttgacattcagaatcccatactacgttgggcctctggccagaggtaacagtaggttcgcctggatgactaggaaatcagaggagactattacaccctggaactttgaagaagttgttgataagggagcttcagcacaatcattcatcgaaagaatgacaaactttgacaaaaatctgcctaatgagaaagtgctcccaaaacattccctgctgtatgagtattttaccgtttataacgagcttaccaaggtgaaatacgttactgaaggtatgagaaagccagcttttctttcaggggagcaaaagaaggctatcgtggatcttctctttaagaccaacagaaaggttaccgtgaagcagcttaaggaagactactttaaaaagatcgagtgttttgactcagtggaaataagcggtgttgaagatagattcaacgcatccttgggaacttatcatgatcttcttaagataatcaaggataaagactttctcgacaacgaggaaaacgaagatatactggaggacatagttctgacacttactttgttcgaggatagggagatgatcgaggaaagactgaaaacatatgctcaccttttcgacgacaaagttatgaaacaactcaagagaaggagatatacagggtgggggagattgagcaggaaactgattaatggtatcagagacaaacagtcaggaaaaacaatactcgactttttgaaatcagacgggttcgcaaataggaatttcatgcagcttatacacgacgattcacttacttttaaagaggacattcaaaaggctcaagttagtggacaaggtgactccctccacgaacacatcgcaaatctcgctggcagccctgcaattaagaagggtatactccagacagttaaggttgttgacgagctggttaaagtgatgggaagacacaaacccgagaacatagtgatagagatggccagggaaaaccaaaccactcaaaaagggcagaaaaattccagagagaggatgaaaaggattgaagaaggtatcaaggagctgggtagccaaattctgaaagaacatcctgtggaaaacactcaactccagaatgagaaactctatctgtactatctgcaaaatgggagagatatgtatgtggaccaggaactggacataaacaggctctcagattacgatgtggatcatatcgtgccacagtcctttcttaaggatgatagcatcgacaataaggtgcttaccaggtccgacaagaacaggggaaagtcagataacgtgccttctgaagaagttgttaaaaagatgaagaactactggagacagctgcttaacgctaagctcataacacagaggaagtttgacaacttgaccaaggccgagagaggcggactctcagaattggataaggcagggttcataaaaaggcagctggtggaaacaaggcagataactaaacatgtggctcagatcctcgatagtaggatgaatacaaaatacgatgagaacgacaagctcataagggaggttaaagtgataactctgaaatccaaactggttagcgattttaggaaggatttccagttttacaaagttagggagatcaacaattatcatcacgcccacgatgcctacttgaacgcagttgtgggtactgcacttatcaaaaagtaccctaagctggaatccgagtttgtttatggagactataaggtgtacgacgttagaaaaatgattgcaaagtcagagcaggagatagggaaagccactgcaaaatatttcttttatagcaatatcatgaatttctttaagacagaaatcacactggccaatggggaaataaggaagaggcccctgatcgaaactaatggcgagacaggggagattgtgtgggataaaggtagggactttgcaacagtgaggaaagtgctgagcatgccccaagttaatatcgttaaaaagaccgaggttcaaacagggggctttagtaaggaaagcattttgcccaagaggaatagtgacaaattgattgctaggaaaaaagattgggaccccaaaaagtatggcggatttgatagccccactgttgcttactccgtgctcgtggttgcaaaggtggagaagggaaagagcaagaaactgaagtcagttaaggaactccttggtatcactatcatggaaagaagctcctttgagaagaaccctattgacttcctggaggctaaagggtacaaagaggttaagaaagaccttatcattaaattgcccaaatatagtcttttcgagcttgaaaacggaagaaagaggatgcttgcatccgctggcgaattgcaaaagggcaatgagcttgctctcccttccaagtatgtgaacttcctttatcttgcctcacactatgaaaaactcaaaggttcacccgaagacaacgaacaaaagcaactatttgtggaacaacacaagcactacctggacgaaatcattgagcaaatttctgagttttcaaaaagggtaatcttggctgacgcaaatctcgacaaagttttgtcagcttacaacaaacatagagataagccaattagagagcaagctgagaatatcatccatctgtttaccctgactaaccttggagcgcctgctgcttttaaatatttcgacaccacaatcgacaggaagaggtacactagcactaaggaagttctcgacgccaccctcatccaccagagtattacaggcctgtacgagacaagaattgatctttctcaacttggtggtgac

SEQ ID NO: 69 - DNA, 4101 bp, Artificial Sequence
  Synthetic polynucleotide
gataagaagtactcaatcggtctggcaatcggaaccaactctgtgggttgggcagtgattacagatgagtataaggtgccaagcaaaaaattcaaggtgctgggtaataccgacagacacagcattaagaagaatttgattggagcactcctctttgactcaggggaaacagcagaggcaacaaggctgaagaggacagcaaggcggaggtacacaaggcggaaaaacaggatatgctacctccaggaaatctttagcaacgagatggctaaagtggatgatagctttttccatagactcgaagaatcctttcttgttgaagaggacaaaaagcatgaaaggcatcccatcttcggcaatatagttgatgaggttgcataccatgagaagtaccccacaatctaccacctcagaaagaaacttgtggactccacagataaagcagacctgaggctcatatacctcgcactcgcacacatgatcaagttcagagggcactttctcatcgaaggtgacctgaatccagataattcagatgtggataaactgtttatacagctggtgcaaacatacaaccaacttttcgaggaaaacccaatcaatgcctccggtgttgatgcaaaggccatcctgtcagcaagactcagcaaaagcaggcggctcgaaaacctcatcgcccagcttcccggtgaaaagaagaacgggctctttggtaatctcatcgcattgagccttggtcttactccaaacttcaagagcaattttgatctggcagaggatgctaaactgcaactctcaaaggacacatatgacgatgaccttgacaatctgttggcccagatcggggaccaatatgcagacctcttcctggccgcaaagaatctgtcagatgcaatcctcttgtccgacatactgagagttaacactgagatcacaaaggcacctctgtccgcctccatgattaagagatacgatgagcatcaccaggatctgactttgctcaaagccctcgttagacagcagttgccagaaaagtacaaagaaatattctttgatcaatcaaaaaacggatatgcagggtacatcgacggtggggcaagccaggaagagttctacaaattcatcaaacctatcctggaaaagatggatgggacagaagagctgctggttaagctgaatagggaagacctcctcagaaagcagaggacatttgataacgggagcatccctcatcaaatccacctcggtgaactccatgctatcctgagaaggcaggaagacttttatccatttttgaaggacaatagggagaaaatcgaaaaaatcctgacattcagaatcccatactacgttggtcctctggcaagaggtaacagtaggttcgcatggatgacaaggaaaagcgaggagacaatcacaccctggaattttgaggaagttgttgacaagggtgccagcgcacaatcctttatcgaaagaatgacaaatttcgacaagaatctgcctaacgaaaaggttctcccaaagcattcactcctgtacgaatattttacagtttataacgaactgactaaagttaaatacgttaccgagggtatgaggaagccagcattcctttccggggaacagaagaaagctattgtggacctcctgttcaagacaaatagaaaagtgacagttaagcaactcaaagaggattacttcaaaaagatcgaatgttttgactctgtggagatcagcggggtggaggatagattcaacgccagcctgggtacatatcatgatctcctgaaaatcattaaagacaaggacttccttgacaacgaggagaacgaggacattctggaagacattgttctgaccctcacactctttgaggatagggagatgattgaggaaagactgaagacctacgcccacctctttgacgataaagtgatgaaacagctcaagagaagaaggtatacaggttgggggagactgagcaggaagttgatcaatgggattagggacaaacagtccgggaaaacaatcctcgattttctgaagtcagacggtttcgcaaacagaaattttatgcagctcattcacgatgacagcttgacattcaaggaagacatccaaaaggctcaagtgagcggccaaggggatagcctccacgagcatattgcaaatctggcaggttcaccagccatcaaaaagggcatacttcagacagttaaggttgtggacgaattggttaaagttatgggcaggcataagccagagaatatcgttatcgaaatggcaagggagaaccaaacaactcaaaaagggcagaaaaatagcagagagaggatgaaaagaatcgaggaagggatcaaggaacttgggtcccaaatcctcaaggagcacccagttgaaaatactcaactgcaaaacgagaagctctatctctactatctccaaaacgggagggatatgtatgttgaccaggagctggatattaacagactgtcagattatgatgttgatcatatcgtgccccagtcattcctgaaggacgattccatcgacaacaaagttctcacaaggtccgataaaaacaggggcaagtccgataacgttccaagcgaagaagtggtgaaaaagatgaaaaactattggagacaacttctgaatgcaaagttgattactcagagaaagtttgacaacctcacaaaagcagaaagaggcgggcttagcgaactcgataaggcagggtttatcaaaagacagctggttgagacaaggcagatcacaaaacatgtggcacagatccttgactcaaggatgaataccaagtatgatgagaatgataagttgatcagggaggttaaagttatcacactcaaatccaaactggtgtcagacttcaggaaagactttcaattttataaggtgagggagatcaataactaccaccatgcacatgacgcctacctgaacgcagtggtgggtacagcattgattaaaaaataccctaagctggagtctgagtttgtgtacggggactacaaggtgtacgacgtgaggaaaatgatagccaagtccgagcaggagatcgggaaagcaacagctaagtatttcttttacagtaatatcatgaatttctttaaaactgagattactctggcaaacggggagatcaggaaaagacccctcatcgagactaatggtgaaacaggtgagatcgtttgggacaaggggagggattttgctactgttagaaaagttctgagtatgccacaagtgaatattgtgaaaaagacagaagttcagacaggtgggttctccaaagaatccatcctgcccaagagaaattcagacaagctcatcgcaagaaagaaggactgggaccctaagaagtacggaggatttgacagccccaccgtggcctattccgtgcttgttgtggcaaaggtggagaaagggaagagcaaaaaactgaaatccgtgaaagaactgctgggaattaccatcatggaaagaagctcctttgagaagaacccaatcgacttcctggaagcaaaaggatataaggaagtgaaaaaggacctcattatcaagctcccaaaatactcacttttcgagttggagaacggtagaaagaggatgctggcaagcgcaggggaacttcagaaaggcaatgagctggcattgccatcaaagtatgtgaacttcctctacttggccagccattacgagaaacttaaaggtagcccagaagataacgagcaaaaacagctctttgtggaacagcataagcattatctggatgagatcatagaacaaatctcagagttttccaagagagttatcctcgcagatgcaaacctggataaggttctctcagcctataataagcatagagacaagccaattagagagcaagcagagaacattatccacttgttcactcttacaaacctgggggcaccagccgccttcaaatatttcgatacaacaatagacagaaagaggtataccagcaccaaagaagttctcgacgccacactgatccatcaatcaatcacaggcctttacgaaactaggatcgacttgtcacaactgggtggggat

SEQ ID NO: 70 - DNA, 3307 bp, Artificial Sequence
  Synthetic polynucleotide
gagcaaggacacctacgacgacgacttggacaacctattggcccagataggtgaccagtatgcagacctcttccttgcggccaagaacttgagtgacgctatactgctcagtgacatcctgagggtgaacactgagatcactaaggcccctctctctgcctcaatgattaagcgttacgacgagcatcaccaggatctcaccctgcttaaggcccttgttcggcagcagctccctgagaagtacaaggagatattttttgaccagtctaagaacggctacgccggttacattgacggtggggcaagccaggaggagttctacaagttcatcaagccgatccttgagaagatggacggcaccgaggagctacttgtcaagttgaaccgggaagacctgctccggaaacagcgtacattcgacaacggcagcatccctcaccagatccacctgggcgaactacacgccatcctccgacgtcaggaggacttctatccattcttgaaagataacagggaaaaaatcgaaaaaatacttacgtttcgaataccttactacgtggggccccttgctcggggaaactccagattcgcatggatgaccaggaagtcagaggagaccatcacaccctggaactttgaggaggtggttgacaaaggtgcttctgcccagtccttcattgagcggatgactaacttcgacaagaacctgcccaacgagaaggtgctgccaaagcacagcctgctctacgaatactttactgtgtacaatgagctgacgaaggtgaagtacgtgacagaggggatgcggaagcccgctttcctgagcggcgagcaaaaaaaagcaatcgtggacctactgttcaagaccaaccgaaaggtgacagtgaagcagctcaaggaggactacttcaaaaaaatcgagtgcttcgactctgttgagataagcggcgtggaggaccgattcaacgcctcattgggaacctatcacgacctgctcaagatcattaaggacaaggacttcctggataatgaggagaatgaggacatcctggaggatattgtgctgacccttactctattcgaggacagggagatgatcgaggagcgactcaagacctacgctcacctgttcgacgacaaggttatgaagcaattgaagcgtaggcgatacacggggtggggaagactctcccgaaaactgataaacggcatcagggacaagcagtcagggaagacgatcttggacttcctgaaatccgacgggttcgccaaccgcaacttcatgcagctcattcacgacgactcactaacgttcaaagaggacattcagaaggctcaagtcagtggacaaggcgactccctgcacgagcacattgcaaaccttgcgggctccccggcgattaaaaagggcattctccaaacggttaaggtggtggacgagctggtgaaggtgatgggccgacacaagcctgagaacatcgtgatcgagatggccagggagaaccagactacccagaagggtcagaagaactctcgggaacgtatgaagcgtattgaggaggggattaaggagttgggctctcaaatcctcaaggagcaccctgtggagaacactcagctccaaaacgagaagctgtacctgtactacctgcaaaacgggcgcgatatgtacgtggatcaggagttggacatcaacaggcttagcgattacgacgtggaccacatcgtgccacagtcattcttaaaggacgacagcatcgacaacaaggttctgacgaggagcgacaagaatcgagggaaaagtgacaatgttccatccgaggaggtggtcaagaaaatgaagaactattggcgtcagcttctgaacgccaagctcatcacccagcggaaattcgacaacctgactaaggctgagcgaggcggactctccgagcttgacaaggctggcttcatcaagcggcagttggtcgaaacccgacagataacgaagcacgttgcccagatacttgactcccgtatgaacaccaagtacgacgagaacgacaagctcatcagggaggtgaaggtcattacccttaagtccaaactcgtcagcgactttcgtaaggacttccagttctacaaggtgcgcgagatcaataactaccaccacgcacacgacgcctacctgaacgcagtggttggaaccgcgttgattaaaaagtaccccaagttggagtcggagttcgtttacggggactacaaggtgtacgacgttcggaagatgatcgccaagtctgaacaggagatcgggaaagcaaccgccaagtatttcttctatagcaacatcatgaacttctttaaaaccgagatcacacttgccaatggcgagatccgtaagaggccgctgatcgagacaaatggggagactggcgagatcgtgtgggacaagggccgcgacttcgcaaccgttcggaaagtcttgtccatgcctcaagtcaacatcgtcaagaagactgaggtgcaaacaggcgggttctcgaaggagtccatactgcccaagaggaactcagacaagctcatagcacgcaaaaaagactgggatccaaagaaatacggcgggttcgactcgccgacagtcgcatactccgtgttagtggtggctaaagtggaaaaggggaagtccaagaagctcaagtccgtcaaggagttgctcgggatcaccattatggaacggtcctcattcgagaagaatcccattgacttcctagaggcgaagggctacaaagaggtcaaaaaggacctaattattaagctccccaagtattcactcttcgaacttgaaaatggtcgtaagcggatgttggcaagcgctggagagcttcagaaggggaacgagcttgcactgccttccaagtacgtgaacttcctgtacctcgcctctcattacgagaagttgaagggctcaccggaggacaacgagcagaagcagttgttcgtggagcagcacaagcactacctcgacgagatcattgagcagataagtgagttcagcaaacgggtgatccttgccgacgctaacctggacaaggtgctgagcgcctacaacaagcacagagacaagccgatccgagagcaagcggagaacatcatacacctgttcaccctcacgaacctcggggctcccgcagccttcaaatattttgacacgaccatcgaccgtaaacgctacactagcacgaaggaggtgctggacgctacccttatccaccagtccatcaccggcctgtacgagacgagaatcgacttgtcgcagctcggtggtgac

SEQ ID NO: 71 - DNA, 4101 bp, Artificial Sequence
  Synthetic polynucleotide
gacaaaaaatactcaattggtctggcaattgggaccaacagtgtcggatgggccgtgattaccgacgagtacaaggtgccgtccaaaaaattcaaggtgcttgggaacaccgaccgccactcgatcaagaaaaacctaatcggtgcgttgcttttcgacagtggggagaccgccgaggcaacacgcttaaaacgcacagctaggaggagatatacacggcgcaagaaccgaatatgctacttacaggagatattctccaatgagatggcgaaggtggacgactctttcttccatcggcttgaggaatccttcctggtcgaggaggacaagaagcacgagcgacacccgatattcgggaacatcgttgatgaggtggcgtaccacgagaagtacccaacgatataccacttacgcaagaagctcgtggactctacggacaaggccgacttgcgccttatctacttggcactggcccacatgattaagttccgaggccacttccttatcgagggtgacctgaaccccgataactccgacgtggacaagctcttcatccaactcgtccagacatacaaccagctattcgaggagaatcctatcaacgcctctggggtggacgctaaagctatcctctcagcccgcctgtcaaagtcgaggaggttggagaacctaatcgcccagcttccaggcgagaagaaaaatgggctgttcggaaaccttatcgcactctcactgggcctaaccccgaacttcaagtccaacttcgacctggcagaggacgcgaaattgcagttgtcgaaagacacctatgacgatgacctggacaacctgttggcccagataggggaccagtacgccgacctgttcctagcggccaagaacctgtccgacgccatcttgctgtcggatatactgcgggtgaacaccgagatcactaaagcacctctctccgccagcatgattaagcgttacgacgagcaccaccaagatttgaccctgctaaaggcacttgtacggcagcagcttcccgagaagtacaaggagatctttttcgaccaaagcaagaacggctacgccgggtacatcgacggaggtgccagccaggaggagttctacaagttcattaagcccatcctggagaagatggacgggactgaggaactacttgtgaagctgaaccgggaagacttactacggaagcagcgtaccttcgacaacggttctatcccacatcagatccatcttggggagttgcacgcgatcctgcgacgccaggaggacttttaccccttcctgaaagacaaccgcgagaaaatcgagaagatactgaccttcagaataccttactacgtcggaccccttgcgcgaggcaactcaagattcgcgtggatgaccaggaaatcagaggagaccatcacaccctggaatttcgaggaggtggttgacaagggtgcctccgcccagtcctttatcgaacgaatgaccaacttcgacaagaacttgcccaacgagaaggtgctccccaaacacagcctcctctacgaatatttcacagtgtacaacgagcttactaaagttaagtatgttactgagggcatgaggaaacccgccttcctgtcaggcgagcagaagaaagctattgtggacctccttttcaagaccaaccggaaggtgacagtgaagcagctcaaggaggactacttcaagaagatagagtgcttcgacagcgtggagatcagcggggtggaggacagattcaatgcctctctcggaacataccacgacttgcttaagatcatcaaggacaaggacttcctcgacaacgaggaaaacgaggatattctggaggatattgttctgactcttaccctgttcgaggaccgggagatgatcgaggagcgtctcaagacctacgcccacctgttcgacgacaaagttatgaagcagctcaagcgtcggagatataccggatggggccgtctgtctcggaagctcatcaacgggatcagggacaagcagtcagggaagacgatcttagacttccttaagtctgacggcttcgccaacaggaacttcatgcagttgatccacgacgacagccttaccttcaaggaggacatccagaaggcccaagtgagtggccagggtgacagcctccacgagcatattgctaatcttgcgggttccccagcgattaaaaagggcatacttcaaaccgttaaggtggtggacgagcttgtcaaggtgatggggcgacacaagcccgagaacatcgtgatcgagatggccagggagaaccagaccacccagaaggggcagaagaatagccgagaacgcatgaagcgcatcgaggaggggattaaggagctagggagccagatcctcaaggaacatcccgtcgagaacacccagctccagaacgagaagctatacctctactacttgcaaaacgggagggatatgtacgtggatcaggagttggacattaaccgcctaagcgactacgacgtagatcacatcgtgcctcagtcattcctcaaagacgacagcattgacaacaaagtcttgacccgatccgacaagaaccgaggaaaatccgacaatgtgccctcagaggaggtcgtcaagaaaatgaagaactattggaggcagctacttaacgccaaactcataacccagcggaagttcgacaacctgacaaaggctgagcggggtgggctcagcgagcttgacaaggctggcttcatcaagcggcagttggtggagacaagacagataacgaagcacgtggctcagatcctggactctcgcatgaacacgaagtacgacgagaacgacaaattgatccgcgaggtcaaggttattacgctcaagagcaaacttgtcagcgatttccgcaaggacttccagttctacaaggtgagggagattaacaactaccaccatgcacatgatgcctacttgaacgcagtggtggggaccgcgcttattaaaaagtaccctaagttggagtcagagttcgtttatggggactacaaggtgtacgacgtccggaagatgattgcaaagtctgaacaggaaatcgggaaggccaccgccaaatatttcttctacagtaacattatgaatttttttaagactgaaattactctcgcaaacggcgagatcaggaagcgtcccctcatcgagacaaacggggagaccggggagatagtctgggacaaggggcgggacttcgctacggtgaggaaggtgctctcgatgccacaagtgaacatcgtcaaaaagacagaggtgcagaccggtggcttctcaaaggagtcaatcctgccaaaacgtaacagcgacaagctcatcgcccgcaagaaagactgggaccctaagaagtatggtgggttcgactcaccgacggtcgcatactccgttctggtcgtggcaaaggtggaaaagggcaagtccaaaaaactgaaatccgtgaaggagttgcttggcattaccatcatggaacgcagcagcttcgagaagaaccccattgacttcctggaggctaaagggtacaaggaggtcaagaaagatttaattattaagctacctaagtacagcttgttcgagctggagaacggccgaaaacgaatgctcgcatccgccggggaacttcaaaagggcaacgagcttgcgctgccctccaagtacgtgaacttcctgtacttggcatcccactacgagaaactcaagggtagcccagaggacaacgagcagaagcagctattcgtggagcagcacaagcactacctcgacgagataatcgagcagatcagtgagttcagtaagcgggtgatactcgcggacgccaacttggacaaggtgcttagtgcctacaacaagcaccgtgacaagcccatccgagaacaggctgagaacatcatccaccttttcactctgacaaacctcggtgctcccgccgccttcaaatacttcgacactaccatcgacaggaagcgctacacatctacgaaggaagttcttgacgctacgcttattcatcagtctatcacagggctgtacgagacaaggatcgaccttagccaactcggcggggat

SEQ ID NO: 72 - DNA, 7399 bp, Glycine max
ttaaatcggttcaaaattgttgaatcgatccaaaactagtaaatacagtaggttaattgatttcacttgaaatttaaaaaaaaaaaattaaaatgacgtcattttagtttttttttaaattattataacttatatgacatttttaagtgaagtttactttttattattattaatttatgcatactaggtttctgaaatattatattaaaatattatatatatatatatatatatatatatatatatatatatatatatatatatatatatatatatattattaaaatcaattccacttcgattgagctattaacttttgaaccaatatcttccccagttcaatgaccatccaagtctgaaaacattggttaccatcaacgttacccttccgtgaattggaaaagttaatgcaatataggttgatccaaggataagtcctatggtcccagaaagaaaatcttgagagatccttttgataattacccgagtttttactctctccttttaattcacgaaattggaaacttcaattgctaatataaaaagaattttgttagccaatatcatcagggtattgtcaaagaattacaagaaaaaaaaattataagataacataaaaaaataaaaaacaacataattttatatattttaataaaaaattcttttaatttttttttatcaatattctatagttactggcatttgacatgtaaaaatgtaaacatatgaattgataaaatttgaccaatgtttgaccctgagataggaatccaacggccccagttcaattgcaatcttttatttttactacgtgaaggcccaacaatggagaaccttgtggattttattgctgagaatctgtggttacgatgatgacacaccaacacaatcacagaaagcaagtaccgtttggaaggcctaacacttcattaattgcttcattaaatttattttactttctagctgctcaatttaattgctttacacaaatacttcatgacgtttcagaaggagggccaaatacaatctctacaatggttccatcgtatctttgaatttgacatttagcatccctccctttgcacaatgtacaatttgcattttgaatatttttttctcaccttcatatcgtgggactacttctataaccatcctggtgaaaataaataaagcgagggaattacgtaattaaacatatttaaatttctctctcctctgtttaattaatttatcaaaaacaaatatgtgtgcgagtatttaaaaatgtgtaaagtattattattttttaatttttcttttttccttctcatcaatgataaatatactttttaatataaaaatcaaacaataactataaaaaaaacatcttcacttcaattcaacattaaataaaaaataatccctgctttgttattttttacccaccaattatcatatttgttatttattatttttttatgttcttgctataaaggaaatcactatttgactcacacaaaactataaaggaatcaaataatcaattattatttaaaaactctattaaaataacaattacaacaaaatcccttatttttttcttccttatcattattaaaccttcccattctctctttctatctctacatgtttttctcaaattaaatattttctatatcctcctttatcatgcaaattaaagtcctcttccattctatatatagccgctacctcctccacctcctttccccactacaacacacaaacaccaacaaccaaatcaatccatccaccctagaaacaacaaagcactctctcttctctcattctattatcttctctcatcctcttattctctccaaaccaacaaaaaaaaaatggttgctgagaactacccttctcccacatacttcatcctcctgttcataaccataacacgtttgatctccacagtgggcaaaacctcccaatggacgaaggccctgtcgctgcctccggaactcgcctccgtctccctcgacgacaccatcttctgcaagctccgtgacgacccagaggccctccagggaagggcctccagggactacgggaacctcgtccgcgaggttcccttggcagtcttccacccagcctcagcgagcgacatcgcgaggctgatcaagctgtcgtacaacggctctgtccccttcaagattgcggcgagggggcaagggcactcgacaaggggccaggcgatggcacgtgagggggtggtggtggacatggcggggttcagagagagagggaatggagtggggataagggttgtgagtagtgtggaccctaataataagaatggttactactattatgcggatgttggaggggaacagttgtggatcgatgtgctacacgccacgctcgagcatggacttgcacctatgtcctggactgattacttgtacttgacgctgggagggactctctccaatgctggcatcagtggccagacattccgctatggtcctcaaatcaccactgtccgggaaatggacgtaatcaccggtaagaaaactttccattcaaccagttaacttacatgtttttagttttttagcttccaatatccaatagtttataacttgtaagcttcaattttatgttaatttataagctagttttaccctacttttgaaaattcaaggattttggtactacaataactcccttgtcaaactcgttcaattgttggcttagtatcaagtagactcttggatttttaggtgtactttaacaaccatgttaatttaattgatcagggttttaatattatggaaattggccattggacaacttggaatggaaggaaagcgggagatggaaagggaaaagaaattaattagaataattgttaatattagttgcgtgaaaaaaattaaatttgctgaattaaattatggttcatcacgactctatttgtggcaacaccaacgtgccgttttcagaacttcattgcaacagcggttatagtggcgtttattcaattcatattttaatgcatcagactgtgattgcgattgaaattttatgaaatcttgttttataaacttgttcttttgattaggaaacttgattctattttatatatatttaatgtaacgccgaattaatggttgataaacgagtctttgtctaaaattttggcgaatgttagcaagcgttttccacgtggtcccgtacgtgtttgaaaaattcttaatcatggaatcagttcacacgggcagtcatagactcatagactccaattcttgattaattgttttcttattaatattggtccatggtcttattttggtcaattctttttattaaaaataaacgggctgctgaattttaatttactcaagtgtttgttaatgaatatgtgtgcatgcatgcaattatatatatatatatatattactattatttatttgtgttttaatcaaattttggtttggttcaggaaagggagaatttgtgacttgctctcagcagacgaattcggagttgtttcacgcggttcttggaggcttaggacaatttggaattataacaagggcaagaattgctcttgcgccagctccgaagagggtacgtttaaaatcttcggaattgactaggacttgtcttgttgcttcttcctccaacatctctcatatagtaacgcaaatttctaaatatgttacattattaattcaaccaccaagctttgcggaagcatcaaatgtcgttgtcctgaaagcttcatgtcatcatttttcttggcacccatatacacacacatacgtttcacattgtgtcagtgcatattagtcatccatgaaagacacatgtacaaatgaaaacgagaggagttatattaaaatgtgtgttggaaaaatatatatcatattttcataagtcttaattttgaaattaatatacagtaaccctttgagaccttagcaattaagccaataaaaaggctcgtattaaccccaaccaacaactattagaaaatactaacaagtataggtgtatacataaatgattcatttgaattttagtaccttaattatttaactttatccttctatttgacgggactcgttgcataagccatacatacataatcatgcgttcattattgtttttcattatgagttaatgagttgattgtatgaactaatggtgaatttttgttggcaggttaaatgggtgagacttttgtacaatgacttttctgcttttaccaaagaccaggaacaactaatatctatcactggaaggaaacaaaatgtttcactggattatttggaaggattgctgctaatgcaccaaggacccataaataattggagatcttctttcttccctttagccgaccatgcccgaataatttcgctagtaactaaacacagcgtcctctattgcctagaagttgccaaatattatgatggccaaaatgaaaacaatgtggacaaggtaccatctccattcatgtgcatttgccttgatgatgtttcttctattttttcttttaatgttttgatctcaccttatataataaccctttatcacactcaatcttgttatatttttaagagtttaatgataatattatgattttgttgtgaaaaaagagagtttaattgttattatataatcacaaattatcattaatatgacttttaaaataattaataatataaaaattaataaatttatcgtatttaatgagttataattaaatgatcatataaaattattttatattattaacatatagtttttttttctatttttaatatttgttttactataagttgttatattttcaatcttttttctagtataagttttaataatcaatattgtaagtaatattctcatttttcatgttgtgtaggaactccaagttttactacaaggattgagctatatccctggattttactatgaaaaagatgtctcatattttgagttcttgaatagagtccgaagtggagagttgaagctacagtcacaaggactatgggatgttcctcacccgtggcttaatttgtttataccgaaatctcaaatcatggaatttgactcgggcgtgttcaagaatatcatccttaaacgaaacatcaccacaggacctgtcttggtttaccccatgaatagaaacaagtaattgagcttaactaactaatctcaacttatgttgttatcattaggaaaaatgttaattggtacgaaaactatatataccactattttcatttaaattcatgaaagtgaaatttctctttcctaaaacaaattctttctcttaaaatgaatttttgtttttctcaatctccatcaattacttatttccttttttgaatgtttgaaaagtcattcacaacattttcttcataaaagggttattcgtaccaatttaaatagaattgccgttattatcagatgtacaattcttctcttcactcacttcttttccattaaaattgtaaaaaaaaaataaaaaaatcaggtgggacaataggatgtcagcatcaatacccgatgaggatatcttctacacagttggatttttgcattcaagtgggtttgataattggaaggcctatgatgctcaaaataaagaaattctacaattttgtaacgttgctgggatcaaggttaagcaatatcttccccactatcgcacacaagaagattgggcaaaccattttggccctaaatggaggacttttgtagaaagaaaacaccagtttgatccaagaatgattctatcacctggacaaagaatctttaacaattaaaatagctttaaaaatatatattcccccccccccccccccccccaaaaaaaaaaaaattatataatatggtgggactacccaagttagctagctggctgatcacaagtgtgcacataggacccagaattcagatgatagcctttgtacttgtttttgttaagagggtggggttaaaagctgcatgactttggcatatatgtagatcaggttacacatactttagatacgttaggttgacaaaatcatgtgtgaaataagatgcacacagctagctgtgtacctttctttctctctgtccctcaatttgtctatcactaaaaagatttctatatagtttagaacctagtgaagagaaagaaaaaaccattatattgaggatttaattttatcacgttctaatcctatacattaatattcttaaatgtgcaatgagtgtgctcggtgccttaatgattctttatctttgttaattgttatattgtagggttttgtttttgccttcctaattttgtaacaggggcacccctagcaataattgagatcctaggttaactaaggaacagcattattgtgtctaaattgagattcctagctgtatgccataataataaatcatcgtaggttgctagatagatgtgatagcgccaaatgccttccaatactataatctccattgcaagatccttcgttgtgattgtgtagaaaagattacgctgctttacaagagaatactccaagaaagcaagtgattgctccttaatataaagaatcatgcaataaacaaatggtgtcgtaatccataaagtgtatttaatatttgatgaaagagtagtgtagacatcaaacaaaataaagtttgatgcaattcgaattatagatacttgattaatctctaaattatgttgagacaatcatatttgaatttgataagactattatgaacgataaaaaatattataaataataaaaaaatttcatcaaacatttaatacaattatataccttactcaaatttgaaaacctgtacatataggaaaaaaacctttactaaaagaggttaaactcaccatacggatttttatatgtcgaagggatctttaattgtccatcggaaaacatcctaattcataaaaaaggaaagaaagtttagacatgaataattacggaccaatgaatgcaacctacgtctctcaattttaaggagaatttaggaatattatagtatatcactgaaagtacacacaagtggcaatgatgaatattttaatttaaagttttaattggattcgaaattaatcccttcttttttccagaaaaaataataatcatcgagtaatcaagacaatttcccaagtagacaacaagaatacaaaagagaatacgtgacttcgtttcaccatagaaaagaaggaatgcaataacgatgataataattataaaatgaaattgacaaaatatctaaatgcctgtagatatttctacagcgaatgataagtgtttttccattaaaaataagtttcttttgttaagaatttctaacatttttagttccaaaatataggaatgaagccaataagtaagtaagaatttctaacgtctgaaag

SEQ ID NO: 73 - DNA, 1632 bp, Glycine max
atggttgctgagaactacccttctcccacatacttcatcctcctgttcataaccataacacgtttgatctccacagtgggcaaaacctcccaatggacgaaggccctgtcgctgcctccggaactcgcctccgtctccctcgacgacaccatcttctgcaagctccgtgacgacccagaggccctccagggaagggcctccagggactacgggaacctcgtccgcgaggttcccttggcagtcttccacccagcctcagcgagcgacatcgcgaggctgatcaagctgtcgtacaacggctctgtccccttcaagattgcggcgagggggcaagggcactcgacaaggggccaggcgatggcacgtgagggggtggtggtggacatggcggggttcagagagagagggaatggagtggggataagggttgtgagtagtgtggaccctaataataagaatggttactactattatgcggatgttggaggggaacagttgtggatcgatgtgctacacgccacgctcgagcatggacttgcacctatgtcctggactgattacttgtacttgacgctgggagggactctctccaatgctggcatcagtggccagacattccgctatggtcctcaaatcaccactgtccgggaaatggacgtaatcaccggaaagggagaatttgtgacttgctctcagcagacgaattcggagttgtttcacgcggttcttggaggcttaggacaatttggaattataacaagggcaagaattgctcttgcgccagctccgaagagggttaaatgggtgagacttttgtacaatgacttttctgcttttaccaaagaccaggaacaactaatatctatcactggaaggaaacaaaatgtttcactggattatttggaaggattgctgctaatgcaccaaggacccataaataattggagatcttctttcttccctttagccgaccatgcccgaataatttcgctagtaactaaacacagcgtcctctattgcctagaagttgccaaatattatgatggccaaaatgaaaacaatgtggacaaggaactccaagttttactacaaggattgagctatatccctggattttactatgaaaaagatgtctcatattttgagttcttgaatagagtccgaagtggagagttgaagctacagtcacaaggactatgggatgttcctcacccgtggcttaatttgtttataccgaaatctcaaatcatggaatttgactcgggcgtgttcaagaatatcatccttaaacgaaacatcaccacaggacctgtcttggtttaccccatgaatagaaacaagtgggacaataggatgtcagcatcaatacccgatgaggatatcttctacacagttggatttttgcattcaagtgggtttgataattggaaggcctatgatgctcaaaataaagaaattctacaattttgtaacgttgctgggatcaaggttaagcaatatcttccccactatcgcacacaagaagattgggcaaaccattttggccctaaatggaggacttttgtagaaagaaaacaccagtttgatccaagaatgattctatcacctggacaaagaatctttaacaattaa

SEQ ID NO: 74 - protein, 543 aa, Glycine max
MVAENYPSPTYFILLFITITRLISTVGKTSQWTKALSLPPELASVSLDDTIFCKLRDDPEALQGRASRDYGNLVREVPLAVFHPASASDIARLIKLSYNGSVPFKIAARGQGHSTRGQAMAREGVVVDMAGFRERGNGVGIRVVSSVDPNNKNGYYYYADVGGEQLWIDVLHATLEHGLAPMSWTDYLYLTLGGTLSNAGISGQTFRYGPQITTVREMDVITGKGEFVTCSQQTNSELFHAVLGGLGQFGIITRARIALAPAPKRVKWVRLLYNDFSAFTKDQEQLISITGRKQNVSLDYLEGLLLMHQGPINNWRSSFFPLADHARIISLVTKHSVLYCLEVAKYYDGQNENNVDKELQVLLQGLSYIPGFYYEKDVSYFEFLNRVRSGELKLQSQGLWDVPHPWLNLFIPKSQIMEFDSGVFKNIILKRNITTGPVLVYPMNRNKWDNRMSASIPDEDIFYTVGFLHSSGFDNWKAYDAQNKEILQFCNVAGIKVKQYLPHYRTQEDWANHFGPKWRTFVERKHQFDPRMILSPGQRIFNN

SEQ ID NO: 75 - DNA, 5917 bp, Glycine max
atttagcatccctccctttgcacaatgtacaatttgggttttgaataatttttgtcacaccttcatttcgtgggactacttctctaatctatacccatcctggtgaaaaataaagggagcgagttacttacttaattaaacatacttaagtttctctctgactctctctcctctttttaattaatttatcataaacaaatatgtgtgcgagtattaaacccgtgcaaaatattagtattattgtttaattttttttccttctcatcaatcataaatatactttttaatacaaaataaaaaatagttaactcagaagatttcttcacttaatcacttcgattcaatattaaaaatcaatccacgctttgttgttttttttcccatgacttatcacgtacatttattatttattatttttctgatgttcttactataaagggaatcactatttgtcacacacaaaactataaagggaatcaaatgatcaattcttatttaaaaactctattaattaaaattacaattacaacaaaaccctaattttatcctccttataattaaacctccacattctctctctctctatcaatacatgtgtttctcaaattaaatattttccatatcctccttttatcatgcaaagtcctcttccattctatatatagcccctacctcctccacctcctttccccactacaacacacaccaacaatcaaatcaatccatccaacctagacatctctcatcttctccaaattaacaaaaatggtagctgggaaatacccttcccccacatacttcatcctcctgctcataaccataacacgtttgatctccacagtgggcaagacctcccaatggatgaaggccctaacgccgcctccggaactcgcctcggtctccctcgatgacaccatcttcagcaagctccgcaacgacccagaggccctccaggggagggcctccagggactacgggaacctcgtccgcgaggttccctcggcggtcttccacccgacctcgtcgagcgacatcgcgaggctgatcaagctgtcgtacaacggttctgtccccttcaagatagcggcgagggggcaagggcactcgacgaggggccaggcgatggtacgtgatggggtggtggtggacatggccgggttcagagagagagggaatggagagggaataagggttgtgatgagtgttgttgtggaccctaataataagaatggttatggttactattatgctgatgttggaggggaacagttgtggatcgatgtgctaaacgccacgcttgagcatggacttgcacctatgtcctggactgattacttgtacttgacggtgggaggaactctctccaatgctggcatcagtggccagacattccgctatggtcctcaaatcaccactgtccgccaaatggacgtcatcactggtaagacaactttcaatttattcagttaattttatcatataattttaccaaatacttataaaccatatcagaaacttttaatttaatcaactaactcacaattagtttaatcatatacttttaatttaatccactaacttataaatttgtaacttttcagcttggaggtttgtaggttataagtctcaactttccactaacttataagttagttttagttttattgtatgtggtacttttgaaaattcaaggattttggtactataataactcgttcaactgttggcttagtatcaaaactcttggattttcaagtgtacttcaacaaccatcttaatttaattgatcagggttttaatattgtgaaaattggtcattggacaacttggaaagtgacacagcttggaaaagaaggaaagagggagatgggaagggaaaagaaagaaaataacttttaaaattagttgcgtgaaaaaattaaggttgctgaattaaattatggttcaccacgactctaattgtggcaacccaacgtgccgtggttgtggatattttcagaactttattgcaacttcggttatagtggcgtttgttcaattcattttttaatgtatcagactgtgattgcgattgaaattttataaaatctttttttttttaaacttgttcttttgattaggattaggaatttcagaaacttgattctatttcatatacttttttttaatgtaataccgaattagtggttgataaacgagtctttgtctacaaatttggtgaatgttagcaaccgctttccatctggtcccatgcttgaaaattttcttaaccatggaaattagttcacacggacagtcatagccttcaattcttgattaattgtttccttttctaaaatatggtgatactattatattattggtccaaggtcttgttttggtcaaatttttttattagaaataaacgggctgctgaattttaatttactcaagtgtttcttaaagaatatgtatgcatgcatgcaattatatattattattattatcattactgttatgtttaatcaagtttaatttggtttggttcaggaaagggagaatttgtgacttgctctcagcagacgaattcggagttgttccacgcggttctgggggcttaggacaatttggaattataacaagggcaagaatcgctcttgccccagctcccaagagggtacgtttaaaatcttcaagaattgactaggactttgtcttgttgcttcttcctccaacatctctcacatagtaacgccaatttctgcatatgttacattattaattcaaccatcaagctttagggaagcatcaaatgtccttgtcctaaatgctttatgtcatcatttttcttggcaccctttcgtttcacattgtgttagtgcatattagtcatccatgaaagacacatgaaaataaaatttgttggaaaaatataaatcatattttcataagtcttttgaaatatacagtaaccttagagaccttaagcaattaagccaataaaaagggtcgtattatcaaaccccaactaacaactattagaaaatactaacaagtataggtgcatacataaatatgtttccactagaaagtatataaagttggtgagatgattcattttgaattttagtaccttaattatttaactttatccttctatttgatgggactcatcgcataagccatacatatatacataatcatgcgttcattattgtttttcattatgagttaatgagttgattgtatgaactaatggtgaatttctcattggcaggttaaatgggtgagacttttgtacaatgacttttctgctttcaccaaagaccaggaacaactaatctcaatcactagaaggaaacaaaatattgcactggattatttggaaggattgctgctaatgcaccaaggacccataaataattggagatcttctttcttccctttagccgaccatgcccgaataatttcgctagtaactaaacacagcgtcctctattgcctagaagttgccaaatattatgatggccaaaatgaaaacaatgtggacaaggtaccgtctccattcatgtgcatttgccttcatgatgtgtcttttatttcttttcttttaattttttgtctcaccttatataataaccctttgtcacactcaatattattatatttttaaagagtttaatggttatacactatttttactttatttaattataaattatcattgatatattttttaagataattatcataaaagttaataaatttatcagttataattgaatgattgtataaaattatttaatttatattgcataatttattttctatttgtaatctttttttactataagttgttatattgtaagtaattaatattctcattttcatgattgtgtaggaactcaaagttttactacaaggactgagctatatccctggattttactatgaaaaagatgtctcgtatgttgagttcttgaatagagttcgaagtggagagttgaagctacaatcacaaggactatgggatgttcctcacccatggcttaatttgtttataccgaaatctcaaatcatggaatttgactcgggcgtgttcaagaatatcatccttaaacgaaacattaccacaggacccgtcttggtttaccccatgaatagaaacaagtaattgagcttaactaactaatctcaatttgtattgttatcattaggaaaaatgttaattggtacgaaaactatatactacactattttcattaaaattcatgaaagtgaaatttctctttcctaaaataacttctttctcttaaaatgaatttttgtttttctcaatctccatcaattacttatttccttttttgaacgtttgaaaagtcattcataacttttttttcataaaaaggtcatttcgtaccaattaaatagcattgcctttattatcatatgtacacaattcttctcttcactcacttctctctttttttttcccattaaaattgtaaaacaaataatcaggtgggacaataggatgtcagcatcaatacccgacgaggatatcttctacacagttggatttttgcattcaagtgggtttgataattggaaggcctatgatgctcaaaataaagaaattctacaattttgtaacgattctgggatcaaggttaagcaatatcttccccactaccgcacacaagaagattggacaaaccattttggccctaaatggaggacttttgtagaaagaaaacaccagtttgatccaaaaatgattctatcacctggacaaagaatctttaacaattaaactagctttaaaaaatatatataatatggtgggactacccaagttagctagctggctgatctcaagtgtacacataggacccagaattcagatgatagcctttgtacttgtttttgttaagagggtggggttaaaagctgcatgactttggcatatatgtagatcaggttacacatactttagatacgttaggttgacaaaatcatgtgtgaaagatgcacacagctagctgtgtacctttctttctctctctctctttctttctctctgtccctcaatttgtctatcactaaaaagattactatagtttagaacctagtgaagatggaaaaaaatcattatatagaggatttaattttatcacacgttctaatcatatacattaatattcttaaatgtgcaatgagtgtgttcggtgccttaatgattctttatctttgttaattgttagtatattatagggttttgtttttcccttcctaattttgtaacggccatccctactagcaataattgagatcctaggttaactaaggaagagcattattgtgtccaaattgagagtcctagctgtatgccataataataaatcatcgtaagttgctagatagatgtgataacgccaaatgccttcaaatactattattaatctccatcgcgagatccttcgttgtgattatgtagaaaagattacgctgcttttacaagagaatactccaagaaagcaagtgattgctccttaatataagaatcatacaataaacaaatggtgttgtagtccataaagtgtatttaatatttgatgaaagagtgtgtagacatcaaagtgataaaactaataaatttaagtttgatgcaattcgaagtcgtagatacttaattaatctctaaatcatattagttttaaaccatacagattttaatatgttgaatggattaatctttaattgtgcattggaaaatattataattcataaaaaaagaaataaagtttagacatgaataattacggactaatgaatgcaacctatatatactacgtctctcaattttgcggagaatttaggaatattatagtatttcactgaaaggacacacaagtggcaatgatgaatattttaattt

SEQ ID NO: 76 - DNA, 1647 bp, Glycine max
atggtagctgggaaatacccttcccccacatacttcatcctcctgctcataaccataacacgtttgatctccacagtgggcaagacctcccaatggatgaaggccctaacgccgcctccggaactcgcctcggtctccctcgatgacaccatcttcagcaagctccgcaacgacccagaggccctccaggggagggcctccagggactacgggaacctcgtccgcgaggttccctcggcggtcttccacccgacctcgtcgagcgacatcgcgaggctgatcaagctgtcgtacaacggttctgtccccttcaagatagcggcgagggggcaagggcactcgacgaggggccaggcgatggtacgtgatggggtggtggtggacatggccgggttcagagagagagggaatggagagggaataagggttgtgatgagtgttgttgtggaccctaataataagaatggttatggttactattatgctgatgttggaggggaacagttgtggatcgatgtgctaaacgccacgcttgagcatggacttgcacctatgtcctggactgattacttgtacttgacggtgggaggaactctctccaatgctggcatcagtggccagacattccgctatggtcctcaaatcaccactgtccgccaaatggacgtcatcactgcttggaggaaagggagaatttgtgacttgctctcagcagacgaattcggagttgttccacgcggttctgggggcttaggacaatttggaattataacaagggcaagaatcgctcttgccccagctcccaagagggttaaatgggtgagacttttgtacaatgacttttctgctttcaccaaagaccaggaacaactaatctcaatcactagaaggaaacaaaatattgcactggattatttggaaggattgctgctaatgcaccaaggacccataaataattggagatcttctttcttccctttagccgaccatgcccgaataatttcgctagtaactaaacacagcgtcctctattgcctagaagttgccaaatattatgatggccaaaatgaaaacaatgtggacaaggaactcaaagttttactacaaggactgagctatatccctggattttactatgaaaaagatgtctcgtatgttgagttcttgaatagagttcgaagtggagagttgaagctacaatcacaaggactatgggatgttcctcacccatggcttaatttgtttataccgaaatctcaaatcatggaatttgactcgggcgtgttcaagaatatcatccttaaacgaaacattaccacaggacccgtcttggtttaccccatgaatagaaacaagtgggacaataggatgtcagcatcaatacccgacgaggatatcttctacacagttggatttttgcattcaagtgggtttgataattggaaggcctatgatgctcaaaataaagaaattctacaattttgtaacgattctgggatcaaggttaagcaatatcttccccactaccgcacacaagaagattggacaaaccattttggccctaaatggaggacttttgtagaaagaaaacaccagtttgatccaaaaatgattctatcacctggacaaagaatctttaacaattaa

SEQ ID NO: 77 - protein, 548 aa, Glycine max
MVAGKYPSPTYFILLLITITRLISTVGKTSQWMKALTPPPELASVSLDDTIFSKLRNDPEALQGRASRDYGNLVREVPSAVFHPTSSSDIARLIKLSYNGSVPFKIAARGQGHSTRGQAMVRDGVVVDMAGFRERGNGEGIRVVMSVVVDPNNKNGYGYYYADVGGEQLWIDVLNATLEHGLAPMSWTDYLYLTVGGTLSNAGISGQTFRYGPQITTVRQMDVITAWRKGRICDLLSADEFGVVPRGSGGLGQFGIITRARIALAPAPKRVKWVRLLYNDFSAFTKDQEQLISITRRKQNIALDYLEGLLLMHQGPINNWRSSFFPLADHARIISLVTKHSVLYCLEVAKYYDGQNENNVDKELKVLLQGLSYIPGFYYEKDVSYVEFLNRVRSGELKLQSQGLWDVPHPWLNLFIPKSQIMEFDSGVFKNIILKRNITTGPVLVYPMNRNKWDNRMSASIPDEDIFYTVGFLHSSGFDNWKAYDAQNKEILQFCNDSGIKVKQYLPHYRTQEDWTNHFGPKWRTFVERKHQFDPKMILSPGQRIFNN

SEQ ID NO: 78 - DNA, 5768 bp, Glycine max
ataaatggtagaaatctgtgggttcaaatgttcaattgctggggatcttcgtgatcatgatgattcatacacaatctctagaaacacgtacgcaaatattaattaatcaatttcctttttatagtctcctcacaattcacatgaaacttcatactctattatccgattccatttccatcgtatctttgaatttgacatttgtttgcccaacatgtaattaactttcccttctcatcttaaagatgtaacatgatatatattataacttgtaattaacccaatatttttaactctctatttttacactcatctgacatgtatttttatttttcatttttttttcttatcacatcacctcttacgtgtacaatttttctctttttcttatttctgtcttccataatagtaattaatattcatcggtccgatatgtatacagcccaaaaaagtgtgtaaaatcatttttgtatttctaaccctctctttctcatgcaagctagcttcttctttctatttatagcccttctcccttcacccaccaacacaccacaactccaaactttttcctcttgttctcttcttcttcaacacaactagtcataatccagctcatctctctctccctctctctttgttctctctttctctttctccaaaatggctctaaactacccttttttaacctacttcatactactgctagtaaccataacccgtttgatattcactgtgggaaaaactgagcaatggaaagctccgattctaccagagcttgacattgataacatatcccacaaactccatgatgaccctgaaaccattcaaatggcttcaagggactatggccatttaacgcatgaattcccattagctgtgtttcgtccatcttctatagatgacatagtcaccttgataaaatcttcgtacaatagctttgccccttttgacatagctgcgaggggccaaggccactccactcatggacaagccatggctcgtgatgggattgtggtggacatggccagcctaagaaaacaaagaaatggggttgcgattagtgtctctaaggaccctttgatgggtcactatgctgatgttggaggggaacaactctggattgatgtgctacatgccacacttgaatatggacttgcaccagtttcttggactgattatttgtacttgaccgtgggagggacactttctaatgctggaatcagtggccagagcttccgttatggacctcaaatcagcaacgttcatgaaatggatgtcatcactggtatggagttagttgttttttttaatcaataaatgttaatattattagcttgttagttttttttgaaaaaattgaattaactttcgtttcctcttttctttctttttttaaccacacaattaatctaataactactggtattaagttagtttattttccatttttcatatataagttaggatttctaattaaaattgacatttcgtaccaccactacaaaaaaataatgtatcagtggcacaaaaaaatatattggcatcacttgtttttttagtcattaatattttgtagcatcacaaaaaatatggtgacaagttttctaaaaattacaaattaactgattcgtcagtgatgttaatgattttttagtgcgtcttggcaactaatgttttcatcttatataaaattagaaacaatagcggcaacagcacctgacattgtgtttgtgttttgcgtgtttctatcgcctaatttttgttgagaacgtgttcgtgaaacttggaaaaagagaaaattgaaattttcttgagatatctaccacttaagaaaaacaaatggctgtttccgttttgtctcttatgacatgacatggtacgtcatagatgaagttctgctaaatatatttgatatgatttcttgaacacgttttatatattcccacttcccagttagtgtggttgttgaatctaattaaaacaggaatagtctttgtctacaatatgggtgagcgatgcaaactttccaagggtttagaagttagaactatataggtccacggtcataattttatattcttgattaactttatgttggttaagtcgttcatatttggtcaattcattcatatgagaaaatactgaaatacaaacatggaaaaatgttaattactcttataattggcgcatgcatgcatctaaattatatgattttaataaatagtttttgtcatctacttgatttcaggaaaaggagagttcgtaacatgctcttcacagaagaacttggagttattccacgcggttcttggaggcttgggacaatttggagttatagcaagggcgagaattgctcttgagccagcacccaaaagggtacgtttatagagaattgactagaattttgtcttgtagcttttcctccaccaattcatatagtgacacctaatcgaattgtcatttttttttacggtgaattgtcattttgtaaatctaccaagtggtagttggcacccatatatgtatgaactatagtaccatacatttcattttatgttggtgtgttagtcatccatgatgaacacatacacaaatgaaaataggacgagttatacgtacgtaagggtttgaatcactgaatgtggatttttgaagttgaaagcatattaatcttggtttgaaaaagaaaaaaaaaatcggaagtccctcttgaagttatcatgactcttatattaagccaatagaattagaaaaactataattatgaatgatcatgttaattctttcagtgacttaaaatcttatctacaaaaagtacccttttgaaaaagaccttcacttaagtccatgcatacagtactaatcttacatacttgagagttgagacttgaagcatgaggagatttgaagtctggagaaacaagccaccacatattaattactaccgtattcttatctttatttatccttccaattttgatgggactggttgcacatacattcatacatactaacatacataaatacgtctctctctcatgtatttcattttattatattctatttcgttagtaagtttactagtataagacattattaatggtgaatttttgttggcatgcaggttaagtgggtcagactactttatagtgacttttctgcttttaccaaagaccaggaacgattaatctcaatcaatggaaggaaacaaaagaacgcattggattttctggaagggatgctgctaatgaaccaaggccccataaataattggagatcctctttcttccctctatctgaccatcccagaatagcttctttaataactgaacatagcatcctctactgtcttgaagtggctaaatattatgacgaacaaaccgagttaaatgtggacaaggtaacctcgtctagtcatatctattatatatagttagatcttgtcacatttctttgtttaaaaaataaaataaaaggcacaatcccaaaaagtcaaaagcaaatgcctagatattgtgtgttttcttggatattaattattacaccttaataacccataataatttttttatttttctttgtctctgtaggaaattgaagttttgctccaaggactagcctatatccctggatttaattatgagaaaaatgtctcgtacgttgagttcttgaatagggtccgaagtggagagttgaaacttcagtcacaaggactgtgggaagttcctcacccgtggcttaatttgtttataccaaaatctcaaatcttggattttaattcaggagtattcaaagatatagttcttaaaagaaacatctcctctggaccagtcttggtttatcccatgaatagaaacaagtaagccttgaatgcatgaatcacaatctagtgtcattataattcaggagtgtgtgatgcaatcttttaattttctgaccattcaactcaatatcaattttatttcttttttcaattaaaatgcaaaagagaataataattaataatatgaaatttaattccaggtgggacgataggatgtcagcatctataccagacgaggatgttttctacacagttgggtttttgcactcaagtgggtttgatacttggaaggcatatgatgctcaaaacagagaaattttggagttctgtagagatgctggcatcatggtcaagcaatatcttcccaaccacagcacacaagaagattggacaaaccattttggtgctaaatggatgaaattcttagaaagaaaacatcagtttgatccaagaatgattctatcacctgggcaaaaaatcttccacaaaaaattacagccagtgttttaaatattttccctaataaaaaaagtaaaaatgttttgtggtgggactacctcaattagatggctagctagggacaggtgtacatacagtgtgaccaagaccaagatggcttttgtatgctaaagtttgcattgctagctagagaaattaataaggtggggcattaaaggctgcatgagtacttttggcacctattatgctacatattaccttagatacgttaggttgacaaagtcgtactggtaggtacaagaagcacagttgtctctcacactgtctgtcacccaacttgctatatagtgtgtggagaaattcggatcatattgaagatgctgtgagttatagtcctccaatattaaatgtttaacgattctgtctttctcttatataattttgttttgcattatattactttcgcactggtgcaaacatatatatcaatgattataattaatttatacaatgacgagtataattgtacccaagttgcatgccataatatttgtcaaaaacaaaaagttgtatgccataatcaatccaggttgctagataataagatagatatgaatatgataacataaaatgctattaaagcaacaaataaacaataacacatagtccttatagggttcataattgatcgatgaacctagctagacgttgattttaggttaatttccagcgaggataaaatttattatataaagaaataactaaccaacacaaaataataaaaaattaaaaaaaaacgaagaaacttattttagagatataatttgttttagtatttgattgtaatttgagagattagctaggctctcaccaagtgagatctagagtatattcttaagaaaatatttataataaagaacccttaaacattttgcaaaacaaagggtggaattaatattaacaacaataattataatatcttgaaaattttatgaaaataatatatatatatatatatatatagagagagagagagagagagagagaaaattctcacaaacaatttttatctgttatttcaaattggtgtatgactccttagtccttagttcatttgtttgcacccagtcctgtcttaggtagttgattttatagttaggtaaattaatttctcgcactcttcgcttgattgtcatttatgggttgaactgttgaagtgattttatattttttaataaatttcacctgcaaaaaaactcaccattagcatacgccccccccccccccccccccccctctcccaaaaaaaaaaaaaaaacgaaagaagattaattagaaagaataaggtcgtgaaatgatgttacaaataaggcatatcagaatcagacgcaagggaagaataaaaacgttacaacaattcgcgcacaatgcaccccaaaaaaaaaatgacaggcacacataccttaaggaagaagaatcaacgctttca

SEQ ID NO: 79 - DNA, 1608 bp, Glycine max
atggctctaaactacccttttttaacctacttcatactactgctagtaaccataacccgtttgatattcactgtgggaaaaactgagcaatggaaagctccgattctaccagagcttgacattgataacatatcccacaaactccatgatgaccctgaaaccattcaaatggcttcaagggactatggccatttaacgcatgaattcccattagctgtgtttcgtccatcttctatagatgacatagtcaccttgataaaatcttcgtacaatagctttgccccttttgacatagctgcgaggggccaaggccactccactcatggacaagccatggctcgtgatgggattgtggtggacatggccagcctaagaaaacaaagaaatggggttgcgattagtgtctctaaggaccctttgatgggtcactatgctgatgttggaggggaacaactctggattgatgtgctacatgccacacttgaatatggacttgcaccagtttcttggactgattatttgtacttgaccgtgggagggacactttctaatgctggaatcagtggccagagcttccgttatggacctcaaatcagcaacgttcatgaaatggatgtcatcactggaaaaggagagttcgtaacatgctcttcacagaagaacttggagttattccacgcggttcttggaggcttgggacaatttggagttatagcaagggcgagaattgctcttgagccagcacccaaaagggttaagtgggtcagactactttatagtgacttttctgcttttaccaaagaccaggaacgattaatctcaatcaatggaaggaaacaaaagaacgcattggattttctggaagggatgctgctaatgaaccaaggccccataaataattggagatcctctttcttccctctatctgaccatcccagaatagcttctttaataactgaacatagcatcctctactgtcttgaagtggctaaatattatgacgaacaaaccgagttaaatgtggacaaggaaattgaagttttgctccaaggactagcctatatccctggatttaattatgagaaaaatgtctcgtacgttgagttcttgaatagggtccgaagtggagagttgaaacttcagtcacaaggactgtgggaagttcctcacccgtggcttaatttgtttataccaaaatctcaaatcttggattttaattcaggagtattcaaagatatagttcttaaaagaaacatctcctctggaccagtcttggtttatcccatgaatagaaacaagtgggacgataggatgtcagcatctataccagacgaggatgttttctacacagttgggtttttgcactcaagtgggtttgatacttggaaggcatatgatgctcaaaacagagaaattttggagttctgtagagatgctggcatcatggtcaagcaatatcttcccaaccacagcacacaagaagattggacaaaccattttggtgctaaatggatgaaattcttagaaagaaaacatcagtttgatccaagaatgattctatcacctgggcaaaaaatcttccacaaaaaattacagccagtgttttaa

SEQ ID NO: 80 - protein, 535 aa, Glycine max
MALNYPFLTYFILLLVTITRLIFTVGKTEQWKAPILPELDIDNISHKLHDDPETIQMASRDYGHLTHEFPLAVFRPSSIDDIVTLIKSSYNSFAPFDIAARGQGHSTHGQAMARDGIVVDMASLRKQRNGVAISVSKDPLMGHYADVGGEQLWIDVLHATLEYGLAPVSWTDYLYLTVGGTLSNAGISGQSFRYGPQISNVHEMDVITGKGEFVTCSSQKNLELFHAVLGGLGQFGVIARARIALEPAPKRVKWVRLLYSDFSAFTKDQERLISINGRKQKNALDFLEGMLLMNQGPINNWRSSFFPLSDHPRIASLITEHSILYCLEVAKYYDEQTELNVDKEIEVLLQGLAYIPGFNYEKNVSYVEFLNRVRSGELKLQSQGLWEVPHPWLNLFIPKSQILDFNSGVFKDIVLKRNISSGPVLVYPMNRNKWDDRMSASIPDEDVFYTVGFLHSSGFDTWKAYDAQNREILEFCRDAGIMVKQYLPNHSTQEDWTNHFGAKWMKFLERKHQFDPRMILSPGQKIFHKKLQPVF

SEQ ID NO: 81 - DNA, 9725 bp, Glycine max
ttaaaaatatttaaagacttaattaaaaattattaaatatttcagagatctataaattaatttaacataaatgaaagtgttatcaaatatgtctagctaattgaaaaaaaaaaacttaaataaaaatttctttttacctgtcttattaggtgactaaggatataattgataaacaaaagtaattaattaattataagatctttaactttataaaaaataaataaaaaaatcttttaaaaaaaattcgacaattaaaaagaaattaacagagggagtaacaattttttacattaaaaaataaatttaaaatttgagtttaacggtcgtattatcatttagtgataaattatcgatataaattttaagataattattataaaaattaataaatttattatgataatttataattaaatcaaaatataaaattatttaacaccacgtgcataataatctaattcacaaaaaaaagaggtaatttatatagtctcttttattaccttatttttctgagtagtaataaatagacaccaagtgttaataataaagtttatcctttctcctcctatccgtctctttatttatttttcattacaaactttatcaaatctatcaatttctctctcttctatctttctctttgttctatccatacaacttaaaaatgtggttgtagtctaaaattttgcctctaattactgtctaccgcggtgtacttgacctgtacaattacctttcagatgctattataactagagaaatttagctcaagacttaaaaacaatggaccaagagatgtgctgtttccacaatgaggcacgtgtctcctcggtccagtcacgtgaagatccacgtgcctttactctgagcttgagccttagtagtttttcgtggttctctccctgtcctataaatttgagagcctgtatcttacatcctagacacacagtagtgactagctcattcattacaattcatcaccccagccaccaacccttttttcatgccaaaccacgaatttgcttctaattttcatgccaaaccctttcttctttcttttgagagagacgcaatccgctcctctatcttactggctagatcaattcctttctattaatttgcttctttctcaatttgtacatgccttcgatcttatagacatacatatatctcctaaactgcacatagagatttaaaaaaaaagaacaagttacaagtagaatttttttggcaagaatcgaagaaagtgagtgagagaaaagaatcttcatctttctgcatgttgcgtacagaatctttaaagccaaatcctgctcacgttaacccacgacgctgttccaagattttgttctcttctctggagcttcccaacattcttcctttccctcatccaccacccccactacccaataactcatcatcatcgtacgccacacacatgacatgcatgtatcttcattaattccttagcgaaaccacacgtactctagcttgtggggtagtttttaattattagttattcttatcttgttcaattcatggctgtcaacaacaacaagcttgttctgttaacattcgccatatgccgtttaatagtaactgtgggattaacggtggtcccggagctgctcgatgtgggactccagggtcgtctcagcgtggacacgttggaactggaggcggcttcggtggatttcgggaggctgagtcgaggggagccttcggaggtagtgcaccctgccacggcggaggatgtggctagggtggtgaaggcggcgttcgagtctccgttcgccgtgtcagcgagggggcacgggcattcgataaacgggcaagccatgataaaagagaagaaaggagtggtgattgaaatgggaaaaagtgatagtggtgaggatggtagtagtattagagtgagtgagaaaggaatgtatgtggacgtgtggggtgggaagttgtggatagatgttttgagtgcaacattggagtatgggctggctcccatgtcttggaccgattacttgtatttgtctgtgggtggaaccctatccaacgctggaattagtggacaaaccttcaatcacggtcctcagatcaccaatgtttatgagctcgatgtcgttacaggtaatttaatatataatataatttgcattcacttttaactaatcacaaatatcattattggtatacttttttaaggtacaatttttgcattcacggttaatttttacaataatagtactatgtttaacatttgacaccttcaaagagaaaaaaaggagttctaccattataaatgattctaaagatggatttatattttcgaaaattaatgtttattatatacatttttaaataatttaaatttgttggtgttattgttgccaaatttgattgttttaccgtaagaaatgatgcttgtgcatgctaataactagttgttcttgttccccaagaggaaaagttaattttcactaattaaacagaggtgtcccactggtttgtcatggtgctgagtacaaacgaatctcgtttatctttagcgtggttaatctcgttgatatcataatgtgtactggtgtgtaacaggaaagggtgagctggtgacatgttcagaagatcgtaactcggagttgttccatgctgttctaggtggtcttggacaatttggaatcatcacaagggctagaattgctctcgaaccagctcctcacagagtgtgtatctctcccacgtactttatctttctttgtctctttttcttactcacacatatacagtacccaattccctctttcctaattgtatgactctcttttcgtactagctcgtgacctcgcacataatatgctaacatttcatgtaataattgaagataaagttataaaaatgaataatattatctgttttcataatgcatacatatacttcatttttattttttagaaacaactcaatgtaaataaaatttaaagtgtaaatattatttctttttttccatcatggaaaaaaaaagtcggttgaacatgatttccatgagatgataggaggggcacacacgatgcgtcttttcttggaaatctttcttcacatcagcgacaaaacctaaaaaaagggtcgttttcgaagggatggtttgggtactcttctaacaatataaagctggaataattatcgtttgcgtgtcgcctgcctgggacattctctgttttaattcatttctcttaacgaactaatatcactatcgattaagggaactgatatcaatgagctataacaatagaatattctcgtctaattaatattattagggtttaatttctatttactgtaaattaatattactataagaaattttacattttcaatcaatcatacatcatcgtggtggtataacttttaaagtgataattactataaaaaggaacatatacttctcatacatgtttatttataattgagagattagataaaatttgtttacacgttcaatagatatattattttctccaataaaattatattagagttagatatatgataaatatttaagtgcaggttcggtggatacgagtactgtattcgaattttgcaaggttttgtaaggaccaggagtatctgatatctctgcatgggaaagcagcaagggagagattcgactatgtggagggtttcgtgatagttgatgaagggctgatcaataattggaggtcttcgttcttttcagctagtaacccagttaaaatcacttccctcaacgctgacggaggtgttttgtactgcttggagattaccaaaaattacgaccaaggaaacgcagattctgttgatgaggtacgtacacacccaatcccacgtacattttctcttctttgtcagtgccttcacttatatataatattattgactgttcatacacttagtgcgctgtcacaataaaatatattcatttaactttcattagtttaattatgtgaagttaccttatttcgtttactaataacgtgttcatatcttatttattgcgtactccacttcgtgtacacattataattgtcattttttatcattttacaccaagaaaataataaataaataagactaataataattttataaaattaatattttattattattaattcatttataaattttgttatttataattaatatgataagcgatataattaaaaaataataattaatgttacatttaaaaattaaaatgataattattttgaaatatttttttctcttgtatgacagttactttaatgttgaagaaaatttagatagaattaaacaaaatgattggacaaaataattaatatattaaagttaaaattaaattatttcagtattatttaagtttgatatttaataaaaataattttttattcgattttacttattttttgattgaattctagattagttgagattcaatttttttaatgagttggagggataggaaaaaaatagttagatagaattaattcttgaaagagtgaaaaaaaaatacattgaagcttttttttattgaaacgtgtaagaatcgagattctaacaaaaaataaaacagggcttaagtagttaagtttttaccaaaatcactccacctagctagctaatgttgcctgtttaatttactttatgtatttttatttttttttcggttacatccatttgtttaaaataattgtttctcaaatatgctacttgatgtccatgttgttcaaattctaaactctagaaaagacatgaaatataagtatgtgtcagaataattaattaagtcttcgggctttttcgtccagtttttgttagttggtcaacacatttatgcttcagagattctataggatttatagggagcaaaatataaaattaacaggcaaacataaaaggacaaaattaatggcgttgatttgaacatcaattaaaaagtaacattgatattcataacaaattaacagacaaatgtgaaagaacaaaaatagcattattcaataccagttgtttttaccacattaaatttgaacgtttagttttgagtcatctgtcctttctctctttatcgttctacccttgagaagatcaacggaagaaatatgtcaattattctgacgaatactctcatatgattatgcgattaatgtcaagattttcttcgttcacaaattcatgcttactttaataattcagtatctgtctgttttatgtttgaagtctgatttaatattgttaatggtatctttaagtaattggtcaaacaattcaattaacaagaaaaatgatatacgctgtccagaggtaatcacattttatttaatttcataatttattgaattaaaaccttggttcttccttcatcgctgtcctcgtatatgattattctctgtacccaaacattgaccagtctctagttgtagaacagaatgcaataaaacatacaaaagaaaacatgtggaagatcttgtgcaatctatcatctcgattcaatcgcaagattgaatgcaacctttacaatagttaattttcactgtttaaaaatgccggcagtccaccagaatattctctcacttgtttttaacttctcttaattaattcttgtcaaagctatatataactgctcacaatagtgggtctcatatcccgacaaaagcaccggctaccttagctagcagctttcctttttcatgcataactatttaatttaagacctagagaggaaaaaagagataaatatagtttaaataagtgatatgatgttatagaaaaataaacataaaatatgttactagagtatttcatttatatatatatatatatactccacttttataaatatatttaaataaatagttatttgtattttgatctactagaatgacgtatgagagatttttttttaatctttaatttttgttattaagtacttatgtttttaaagttaaacaaagttagtctttctattaatattctttacaaaacgtcaaaacctttaagttcattttctgtttaaaatatttataaattatatctattacattatttaaatactttttattcgaagcataccaaccgaaattaaacatcaaaagacattttcttagatttctctttgtacgtttttatggtatgcaggaaatacaagctctattgaaaaagttaaattttataccaacatcggttttcacaacggacttgccttacgtggattttctggatcgtgtacataaggcagagctgaagcttagatccaagggtttatgggatgtacctcatccgtggctcaacctttttgttccaaaatcaaggataggggacttcgacaagggtgtgttcaagggcattcttggaaataagacaagtggacctatcctcatataccctatgaacaaaaacaagtaagtttataaatatatatttccgcatgcatatccatttgttatactatcatattcatccatgtcctagtcatatatatgtagaataaaaccactgcatgtttgcaggcatgcacatatctcctcatatataaaccacatgtctgctgctgatagcctcatatcgactgtcagtgtttagggaagaagaaaagaaaagaaaaagttcaaatgagtaatgaaatagagtatgaagttttgtgatcatatatgaaagagaaaaacctgcaacataatatatattttctacaacgaatattcccaataattatggaactagatgaaaatgtgtgaagattctccacgattgatggacagatagtactattgtcggaattaatggattagggaataaacagaatctagacgtttacattaatcctaataatagatggctgaatctgtttgtttctactttcattgtgtgtattaattaatccaggtcctcgataattcttgaattaaagaagattctgtttgataaatttgtctacacttaattaaacactgacaaaaaaaactaaaatgaattaatttatttttataaattaaaatttacatctcaataaaatattagctatagataacttaaattaagaatgcttaatccaattaagtgaaaataaaaaatatgaaaagaacaagaagcacagtgaggtgcatgtagtggaaagacatggaagacacacgagggttgtattgtagccaacatagcagatgaaaatctgcatcaaagccagctaggaagtgccacgtttattatttcttgaccagaagcaaacaaaatggatggccatgatcatccaactggagagattctggtgtcagaagatcttccatagggacccactcctcgaatggtagggatgtctcctctccactcctcaccttttatactaacctagttccatagacaccgccatatgcatcaacttccaggtcaatatcaatataatatgcacaaataaacaaataaaaaccataataattgcacttagttatgttttttttttttcattttaaaaataccaaaaattaatgataatgatatcacaaataaaaataaaaatgcatgtttgttagagggtatataatataagaaagacaacgcttgtccaaagcatttatatatagagagagagaataagataaaaaattaaatgaattctatgtatcttgccataggtttctgactgataagtcgatggattattaatgtttttgaattagaccacgaattagaaatacttaaaaaagttctattgttatttcaacagagtagtagtaagtaaagtaaatggtttcaagtgtgcagtatagatgaatagaaaaattcaaaagatgattttgggcgatggtgatgtgtaggtgggaccagcgaagctcggtggtgacaccagaagaggatgtgttttacctggtggcatttctaagatcggcattggatactgagacgctggagtacctgactaatcagaaccgtcaaattctgaaattctgccatgatatagagatcaaggtaaaacaatacctgccccattacactacgcagcaggagtggatggaccactttggtgataagtggacccagttcaatgctaggaagatgcaattcgatccccgccgaatcttagccacaggccagcaaatttttcagtttcatccctcactcaccctcaatatgtagaacaaacatgcaaaatggataaataatcttgggttcatgttgagtagcaagtgctgtattattgtaattaggaaatacaaggaggatcatggcaaaaaaagaattagaaggatgtagttgtagtgcactagtgaaggatcaagagttgttgaggtgttgttatctgagggtaataaaattgatgatggagttggatttttgttatgtaatggggtcttgtagcaaattaagtaaggaacccaataaggattaggcccaaagaatataaggagtggtggggcccgctttggaggaggaaaagggcaatgcgcaagtgcacatgagcaccgcccgtctggtttggctgtctcgtttttcaatatagatatcttttattacccatccaaattcctcgtacatataattcttctagatgtattagtctgtatgtttatttcaaatggaaacatttaatcagtgactccttataaaacataatcaacggcatttatgaataaagttaataagttaagagggaaaggaaagaggagaggaaaatgttcaaatgaatcaaatttctcccattaacatttttaataaaattaatatttatcgataaaaaaaatatcaacaagttaagaaaataataataatagacatgtattgctaatataaaagtttccgtacacaattaattaattagaaactatcttaaatatcacttttaacaaagtaataatataaatcaataacataactttttttttatcactataatattaatgtgacatatttgtctattttgagaggttggaaacttggagacgagctctagaaacacatgactttcgcctaaacagaagcaaatcggagtatatggaatgtaagttcaacaaaagtaagagggtatctaactcagatgtgaaaatagaagaccatattatccctcaagtcacacagtttaaatatcttgggtctgtaatacaggatgatggagaaattgaaggggatgtgaatcatcgcattcaagcaggatggatgaaatggagaaaagcatcaggggtgttatgtgatgcaaaggtaccgatcaagctaaagggaaagttttatcggactgcggtaagaccggcgattttgtacggaacagaatgttgggcggtcaagagccaacatgagactaaagtaggtgtagcggagatgaggatgttgcggtggatgtgtggtaagactcgacaggataaaattagaaacggagctattagagagagggttggagtagcgcctattgtagagaagatggtggaaaatagacttaggtgatttgggcatgtagagagaagaccggtagactctgtagtgaggagagtagaccagatggagagaaggcaaacaattcgagacagaggaagacccaaaaaaactataagagaagttatcaagaaggatttcgaacttaatgatttggatagaagtatggtacttgatagaacattatggcagaagttgatccatgtagccgaccccacctagtgggataaggtgttgttgttgttgttgtatttgtctattttattaatgattaatttctgttggagaacttaatt

SEQ ID NO: 82 - DNA, 1575 bp, Glycine max
atggctgtcaacaacaacaagcttgttctgttaacattcgccatatgccgtttaatagtaactgtgggattaacggtggtcccggagctgctcgatgtgggactccagggtcgtctcagcgtggacacgttggaactggaggcggcttcggtggatttcgggaggctgagtcgaggggagccttcggaggtagtgcaccctgccacggcggaggatgtggctagggtggtgaaggcggcgttcgagtctccgttcgccgtgtcagcgagggggcacgggcattcgataaacgggcaagccatgataaaagagaagaaaggagtggtgattgaaatgggaaaaagtgatagtggtgaggatggtagtagtattagagtgagtgagaaaggaatgtatgtggacgtgtggggtgggaagttgtggatagatgttttgagtgcaacattggagtatgggctggctcccatgtcttggaccgattacttgtatttgtctgtgggtggaaccctatccaacgctggaattagtggacaaaccttcaatcacggtcctcagatcaccaatgtttatgagctcgatgtcgttacaggaaagggtgagctggtgacatgttcagaagatcgtaactcggagttgttccatgctgttctaggtggtcttggacaatttggaatcatcacaagggctagaattgctctcgaaccagctcctcacagagttcggtggatacgagtactgtattcgaattttgcaaggttttgtaaggaccaggagtatctgatatctctgcatgggaaagcagcaagggagagattcgactatgtggagggtttcgtgatagttgatgaagggctgatcaataattggaggtcttcgttcttttcagctagtaacccagttaaaatcacttccctcaacgctgacggaggtgttttgtactgcttggagattaccaaaaattacgaccaaggaaacgcagattctgttgatgaggaaatacaagctctattgaaaaagttaaattttataccaacatcggttttcacaacggacttgccttacgtggattttctggatcgtgtacataaggcagagctgaagcttagatccaagggtttatgggatgtacctcatccgtggctcaacctttttgttccaaaatcaaggataggggacttcgacaagggtgtgttcaagggcattcttggaaataagacaagtggacctatcctcatataccctatgaacaaaaacaagtgggaccagcgaagctcggtggtgacaccagaagaggatgtgttttacctggtggcatttctaagatcggcattggatactgagacgctggagtacctgactaatcagaaccgtcaaattctgaaattctgccatgatatagagatcaaggtaaaacaatacctgccccattacactacgcagcaggagtggatggaccactttggtgataagtggacccagttcaatgctaggaagatgcaattcgatccccgccgaatcttagccacaggccagcaaatttttcagtttcatccctcactcaccctcaatatgtag

SEQ ID NO: 83 - protein, 524 aa, Glycine max
MAVNNNKLVLLTFAICRLIVTVGLTVVPELLDVGLQGRLSVDTLELEAASVDFGRLSRGEPSEVVHPATAEDVARVVKAAFESPFAVSARGHGHSINGQAMIKEKKGVVIEMGKSDSGEDGSSIRVSEKGMYVDVWGGKLWIDVLSATLEYGLAPMSWTDYLYLSVGGTLSNAGISGQTFNHGPQITNVYELDVVTGKGELVTCSEDRNSELFHAVLGGLGQFGIITRARIALEPAPHRVRWIRVLYSNFARFCKDQEYLISLHGKAARERFDYVEGFVIVDEGLINNWRSSFFSASNPVKITSLNADGGVLYCLEITKNYDQGNADSVDEEIQALLKKLNFIPTSVFTTDLPYVDFLDRVHKAELKLRSKGLWDVPHPWLNLFVPKSRIGDFDKGVFKGILGNKTSGPILIYPMNKNKWDQRSSVVTPEEDVFYLVAFLRSALDTETLEYLTNQNRQILKFCHDIEIKVKQYLPHYTTQQEWMDHFGDKWTQFNARKMQFDPRRILATGQQIFQFHPSLTLNM

SEQ ID NO: 84 - DNA, 3661 bp, Glycine max
cttctcatccaatctaatagcaggatacgcgatgtttacattccgacaatagtggactcagtaccaacaccataaaaaaaaataaacaactagttatgtgtccataggggcaaaagaaaaagaaatacgcactactgtggaaagaagaaaaaaagcaataaggacttatttctatatccggaaaaagcatatatccttaaattggttaatgaacaaaaacttgaaacatgtctttccttcatgtttttgttgtaacttataacataacatgtaattgtttgtggttaccactgtttggaaaaagttgaagatttgtgagatctctcattgatgttacttttcctcttcaacttggcttctgtgtcactgtacatgtgatgcctttggcgtctctcttccttccaagtaagcagtccacatacgcattctcctcgtatcgtatgtcataagtcatgactgatcaacaatgctacgttgaccaagccaccacccacaaactcctttaaattctggcccaaacccttaagttcctgcattctccaatccatcactttctccttttcctcgtgttcacaaaatcacgctgcttaattattccttcaactaccatcatatcataccttctcaacagaaaaataaaaataaaaatgagatacatccttggagaacacaacattctgttcctcaaaagcttcgccttcacgatattattccttagttgcatagccattcggcttaacttgtgtctttccagcatcccttcttcactgaaatcaattccccttgaagggcatttaaaatttgatcaagttagcctaagccatgcagcaagggactttggcaacaggtaccaatataatccaatggcagtgctgcaaccagaatcagtttctgatattgtagccaccataaggcatatctggctgatgggtcctggctcccacctcaccattgcagcgaggggccacggccactcgctgcagggtcaggctcaagcccatggaggacttgtgatcaacatggaatcactcaaggtcccagaaatgcaggtatatcgctaaatattaattgttaatcgttaattttttgttagctaggcaatcaaatccacaatcttttcctctcttccttcttcttatacaaccaaactaaccttataactccaatgcagatacatgttgatgagggaaacaagtctcctccatacgtggatgtctcaggtggcgagttgtggataaacatattgcatgagactctaagatacggcttggcgccaagatcgtggacagactacctgcatctcacagttggtggcactctctccaacgctggtgtcagtggtcagacatttaggcatggtccccagataagtaatgtacagcagctcgagattgttacaggtttgtgaaaaagagaatgaataataattgtttgtcttttctgaataataattcatttgatactggctgcatataagttttctaataaataatttttttcccctactttgatgagtaaaacatggtcaatgaatggatgcaggaacaggggaggtgttgaactgttccgcggagaataatggggatctctttcatggtgttctagggggcttggccaatttggcattataacccgggcaagaattgtcctagaaccagcacctaccatggtaatgcatcactcatcagtgactataccaaaacaagcttctttttttttggttttaatgtgtgctttgggtcatgactgaaaattttctatttattggaacaggtaaaatggattagagtgctgtactcagatttcacagcattcacaagagaccaagagaggttaatatctgcagaaaagacttttgactacattgaaggatttgtgataataaacagaactggtcttctaaataactggcgattatccttcaacccacgagacccggtccaagctagtcatttcaagtcggatggaagaactctcttctgccttgaaatggccaaatacttaaacgtggaagaaatcgatgcagcaaatcaggtgaggccagcaacactcaatctaatagatttttttgaaaataaagggataattaactccaaggttttaaaatatgagaccgtgggttgcaacatcaaagttttctaactctttgcgacccgaattgagactatgtcgatagcatttgtctatgatttgcccgtgatatcaacaaacacgaccaaaccacatgcgactgcgacctatatttaaaaccttgattaactcattagtgataatctttctttaggaaagaaaataaaagaggctaaatcaaccgtatctcacttttgtgtgtgcaggaagttgaggaacatttgtcccgtttaagctacatcccatcaactcttttttcaacagaagtcacatttgtagatttcttagacagggtgcacatatccgaggtcaagttgcgttcaaaaggcttgtgggatgttccacatccatggctcaatcttctaatacccaaaagccaaatactcaactttgcacaagtcgtcttcgggaacatcctatcagaaactagcaacggccccgtccttatctacccagtaaacaaatcaaagtaatgaatggttcagaaaaaaacatactattaactctagaaacaaatattttagccgtcaatattttttaattgacatgttttgttttgtttgcaggtgggacaacagaacttctgttgtgattccagaggaagatattttctacttagtggcatttcttacatctgcagttccatcttcaaatggaactgatggcctagaacacatactaagtcagaacaaaagaatattagaattctgtgaaagagcacaacttggagtgaagcagtatttgccccactacaacacacagcaagaatggagggcccattttggtcctcaatgggagacttttctgctgagaaagtccgtttatgatccattagcaatactcgcccctggccaacgtatatttcaaaaagcaataaccttctcatgaccacatttttattattaattattaaaaatctgaaaaaaaaaaagagaagaaaagtccttcatggcatgtgccaaaatgaaaaaaaaatgttatatgatccagacaggttttgacattgaccatacagaatgcaattgcaaaggaagaaggttcattgatagtagagaaaaagagggagaaaaagagattacaaaatgatgactggtgagatttgtatgccttgcaggttaatgaggaaagttgtcagtgtatgtaggtatgtaccattactgatggaaaaattgccttacgtgctgagtgtagcaccaaggcagcagggtccggctgagattagatcaacaaaacacattaatcattgtagggtttccaaagaacttataaatattatcagcgctagagccaatgtatagtactatcaattttgtaaacactcccttatttgttctctgtctcacatgtatccaaattcattaagattataattaaatacagatatttatgcatccaccacaaaaagatatcaatacgttcgcaacaaatacagataagatgatatataatgctgagtaacaaatactactattctagaaaattgcggaaaatgatataaaaatgggtatgcctaccctgaaggatgatgaat

SEQ ID NO: 85 - DNA, 720 bp, Glycine max
atgagatacatccttggagaacacaacattctgttcctcaaaagcttcgccttcacgatattattccttagttgcatagccattcggcttaacttgtgtctttccagcatcccttcttcactgaaatcaattccccttgaagggcatttaaaatttgatcaagttagcctaagccatgcagcaagggactttggcaacaggtaccaatataatccaatggcagtgctgcaaccagaatcagtttctgatattgtagccaccataaggcatatctggctgatgggtcctggctcccacctcaccattgcagcgaggggccacggccactcgctgcagggtcaggctcaagcccatggaggacttgtgatcaacatggaatcactcaaggtcccagaaatgcagatacatgttgatgagggaaacaagtctcctccatacgtggatgtctcaggtggcgagttgtggataaacatattgcatgagactctaagatacggcttggcgccaagatcgtggacagactacctgcatctcacagttggtggcactctctccaacgctggtgtcagtggtcagacatttaggcatggtccccagataagtaatgtacagcagctcgagattgttacaggaacaggggaggtgttgaactgttccgcggagaataatggggatctctttcatggtgttctagggggcttggccaatttggcattataa

SEQ ID NO: 86 - protein, 239 aa, Glycine max
MRYILGEHNILFLKSFAFTILFLSCIAIRLNLCLSSIPSSLKSIPLEGHLKFDQVSLSHAARDFGNRYQYNPMAVLQPESVSDIVATIRHIWLMGPGSHLTIAARGHGHSLQGQAQAHGGLVINMESLKVPEMQIHVDEGNKSPPYVDVSGGELWINILHETLRYGLAPRSWTDYLHLTVGGTLSNAGVSGQTFRHGPQISNVQQLEIVTGTGEVLNCSAENNGDLFHGVLGGLANLAL

SEQ ID NO: 87 - DNA, 8277 bp, Glycine max
ctacttctagaatgacaactactcctatggcaatatcaattgttagcggtggttcccttaagttcgagactaagggcagtctccaaaaggaagaaaggaaataacaaacttaagcctgaatgttctacgttttatttagtgtctcttgatatttaaaggtctatcaaatatgtataataaccgcacttccactataataaccacactcccactacgataatcgctacaataaccaccacaataactacttctaggatgacaactacctctatataagtttccatgacagaacatcttcttcctaacaccttacctatcacaaatgcttctcctctcggtgtcagagagtactattgattccctaagttctgacggtgtctttttctaaccaaagatccacttttcgaaggtcccgagccaattcgatgagagctcggaggcatagaactcggtttagtcacttatgccatgcttcatttcgtcgcgcgtactttaccaatcaacacacgccatcgagattgatctgcaagtgcagattacgtaagcgagaaaggatttgcaatggaattcacaaatcgcacaatcagagaacaggataagtgtactgctaattatgagcgccagggagtgtagattcatgtcttaggttttaaaattagaacagaataaatatgaaaattgttttttactttctatattttatattttaatttttttttagtttttattattagtaatattgttaattataattaattataaaaattttaacaagtaatttattactaatttatcataagataatttataataaaaaaataattgataatttataattaatttataactaattatttttatattttgtttagtaaagactaaaaggtaattaaaatgtaaattatagagattaaaatatcatttttaaactataagaactaaaaaagaattaaaatacaaactataagacaaaaaagatcacttttaaactataggaactaaaaaaattacttttaaattatatggactaaaaaataccaatcgtaaaattataggaactaaataaataatataaccttaaattttttattttaagatcaattttttaaaaaattaatgttaatcatgatattttatttataaaatatcaaaactcattttgtaaaatggattttcatcaaaataaacgttcactttgctatggtaaatcttgttttgtagtattttggttgttctgacccaaatgacccaaatgcaggctagtggacaatgacattgattgttttgtatatgggttgggtgtcccttgtatcctattgatatattccttttgccttattaagaaaaattgcattagaaactactatatattaaatgctctaacaattaatgattaaattgacaccacatcctgtttgactctccacttttcttttattggtactctctattttagtctgctctttatatacatgttaacttaaagacagcaaatttaccaaagtaacttatcttctctcttgaaagaaaaatgccacagaggaatttagtactattttccacaactatggttgtgctattgctatctagcatagtgctcacacaagcacaaccacgatcatggtcagcattccaagcatccaaagaactagccacaaagcttagtcgtaaccctcaaacctttccacatgcctcaaccgattatgggcacatagttcacaaaaccccagtggcaattttcaatccatcttctgttagtgacatcttggccttgatacatttctcaaactctcttcctaacccattccccatagcccctagagggaaagcacactctgttcatggacaagccatgacaaaagatggggtggtgttgaatatgactaacctcaatagcagttttcaaaatgggttaggggttttggtgtctgcttgtgatggaaaaggtccattgatttgttatgctgatgtaggtggtggccaaatgtggatcgatgtcttgcatgcatcccttgaacgtggactcacacctttgtctttgactgattatatgtatgccactgttgggggcacactatctaatgctggcatgggtggcatgtcctttcgatttggacctcagatctctaatgttcttgaattggatgttattacaggtatgactcactcaattttatcaattaattttcttccatactcatctacacgcttgttcgaagtgaaacatttaactgaattttttttatcttggatatcacaattgtgtaatttttcgtctagatttgtgattatgttaattcaatctgtatatcttaataattatattaaagtccctccctccttcaattatctgtcaaatatttaacgaaatatatttatgtgacatttgagaatgttgatgggtttatatgtgttattttagtcgattagattttacgtgtgaagttttagtgtctcccaaattcttattaacattgtgggaaaaaatgagaaaacaatcgcagaactggagtttgattccagattattattattatttagtaattttattattatctatatcataatagtatatttattaactcatttaatatcatatttattacatatatttagtgtaataatagtatatttattacattctttttacatacaaaaagtcagaaagacttaaaagcttctacaaaaagaaatacctgttatatcagctcttaaagaattacatatgaaatcctacgcatttattacacacacacaaatatatatatatatatatacttaaacagaaatatgaattgttattatatttataattagtatttatattaatagaacaatttatagtttatactatggaataaatttttaaatataaatttattatttatattgatatactcatttatagtttttactaagatataagtttataaatataaatttgcacctcttgtgattttgaactggttttttaataaataaaaaataaataaaaagattataaatataaattattattacattaacataataatttacatttattaatttaatactaaatatatatagtaaatgtatcattaaatgaatgtagtaaacatattattaattttcagaaaagttttaatactttttcaccctagaaatatacaaattttttttaattgatataatttttttttgtttatgattcttgtattaatatttaaaccttccgttggagattaacgggtaaaaaatacaaggtttaaacattatataagtaaagttttcttacaacgacaaaacaaaactaattaatatatttacagctaatgatgtttgtttaaaaagtgctaattatatttttttgttctagtcaatgttgtatagttacccaacatataatcagtgacggactttttagttgtggggaaatattcattatatatatatatatatatatgaatcggtgctgcatataatacaatatatacaattttacactgaaaactgtatattattaaaatttatcaggaattatgcttaaatatcttattgtatctatcttattaaagaaatctaattatatctataaaataaaggtttatttcgatcgttttgatatattgtaaatattattttttttgtttgtttttctcgtataaactttaatacatctatatatgtggcttttatatatagggaaaggagaccttgtgacttgctccaaggagcagaactcagaggcattttacgctgctcttggaggattaggtcaatttggggtgataacaagagcaagaatacctctaggacctgcacctactagggcaagtattagtttcccctttcatatagatttcgtaagggtgaaaataaaaataatattttataggactaaaattaaactaatttcatataaacctaaattaaaactcactcaaattatagatgtattaaaatcatatttaatctatatatatgccatttaattttaattgaaacatacatattatatatagatcattttttcctgtaaacttagtcttagacactatacaacttcaatactattaaaattgtaccaaaattaactatcttaaaactaaaaatgagaataagtcgggtaattgacataagtctatgagctcacttgtttaaagcttggtctcatctatctaataaaaaaagttaaacttaaactttttaaaaagtctatttatttatataatttagacttggacttgtgaaaaaacttattaaactgtatagaccggtctaattattcatttaaatatagtaaaacattaaaatatattatacttttattttaatatcttaatatgttaatatatttttatcataaataaaatgaatatttgaaataaatagatctttaaatatgtaataagctaaactatatcatatcttaatttttataacatgccatacctatatatttatataacgtctaacttgacctaacatattatcacccctacttaaaaattatttatctatttatttttaacaaagtttttttcatgtgggtgtttgcaggtaaaatggctccgcctgctatacaacaacttcactgcattttcaagagaccaagaacatttaatatcgttcagtgaaaggaatgacattgctacagcagattatgtagaaggcatgcttctattgaatcagccgccactggatcttctcttttatccagcttctgatcatcaaagggtaacttccttggtaactcaatatggcattatctacatcttggagcttgccaaatactattacaataactctcaggcacatgtcaatgaggtaacttgaaataaaagttgtttttagcatctagttagaaacttcttttatttttattcttatttttttatggacaacatatataatgaatttagtaaagaaatacagagatattctaattgttatatattcatcatacatcaaagatcaaattaatcctcctgattgaaaagaattttgttttcatgaatccaaaagaaacatgtctcaaactcactcaaattgtatggaacccatatattaattaatttatgtacaattcattgttttttactaaattgattatttttcttgtttcttaaataggaagttgcatatttgctgaaagggttaaactttgtacatacatttgtgttcgaaagagatgtgtcatacgaggagtttgtgaacagagtttatcctttggagcaaatgcttaggtcagaaggactttgggaagttcctcacccttggctgaacctctgggttccaagatctagaatctcagattttgatgaaggtgttttcaaggacattgttcttaagcaaaatattactggcggaagttttctagtctacccaacaaacagaagaaacaagtaaattgattagattatttatttttttgtgagtgtcaaattattatctagatcacccgtctcctttaatttacatatcctttctagtgtttccaatatataaaaaaatgacacctcactaaaaaaaataacaaataagagaatttattgttttttaaccacatttttttattgagagaaaacactccacaagaaaaataataataacaacaaaataatttatgtaatttttaaaagaaaaggtcacttaaatttttgcaactctaaaattagttattgaaaaaaaaaacctcaagtctcacatttactagaggaacctcctaagttttttctaaaatgaatatatttctaaaggatatgagacttaaagttttttcaatattaatttacaacattgtgctctgattcaaagtcaagcaatctcctagaataaaagagattgaaaatagcactaacactattggtggggtttgtggtttgtggtctgtggatttaaatttggcatgtggtatttaacagaacttcaacagaggtataaattataaaagatttttttttctgagaaaaagaaataaatggaggtatgttattaaaagagggagtatgaataacaactgtcctaataatactccattgggcctgacagtaggagttgggccataacaattagggacaaaaaataattttggttactaaatttagtcaataattccttttcttagtcacattagatgtttctgttccaatttatttgcttatgtaaatgacttaatttatacatatgtgaggattaaattgaatcaacattatgcttcacaggtgggatgataggatgacaccaattacacctgacgaagatgttttctacgttgtagattttttgcgtgttgctaaaacgtttgatgtggtggacaaactacaggttcaaaacaaacagatactgcggttttgtaatgatgctggtattaagatcacagagtatcttatcgggaacaaaactcatcaacaatgggtggaacactttggcccaaaatggaaactttttgcagatagaaaaactgaatttgatcccaaaaaaatattgtcacctggacatgggattttccagtaaataatgtgctaggtttcagtgaaatctctcattttggaaattcatgaaataaaaatgaaattctgtaccagaaaaaaaaaaaaaaacttgttgtgtaattctgtgccaaacatacattgaattggattgaagttattatgcaattttgtacgaaaaaaaacttatgtatttgattattttatgtttttttattaatgttgaatgttcaaatattctcatgactcacgaacaacggcagatctagaagaaaaaaatggtcgtaagatgtgttgatggtatttaaatgaatgcatgtctacttcaaaatttatttgatagactcatttcgtaaaaaaaaaaaatagaaataacctatttaacaatacttgtttggaaaataaatttaaaaataagaaatttggtcgtttttttatatagaaaatagcattgtttttatgatattttaatgcaattcacgattttatgttgttgggtttttaaataaataaaagttacataaaactttagttttaaattttctttgggactgtgaatggagttaaactctaaaaaagatctataattccaaagtcaggttaccatcaaatattgacatatagcaaaaaaaaaaactactcccttgggaaaattatataaaatattaccttgtcaagagacttgcatttatacaaatgatttatttagcaaaattgttgcatcatgatcaaataggacaaacgttgctaaatcaatgtcactaggcattggcacccttacaagttacaagatacctttaagaaatcgaaaactatttttttcaaaccctttgttttgtgaattaactctttatgagctattttatccctctcaatcggaatataaagagatttttccttacatgacactagtggtctgatcctaagtttgagcttgctcgatgataagcaatgattttaagttttgggtgagaatatataaaaacattggttggagcgttttttgtttttatttttaaagaaaataaaaaataagaatgaaaatatatttatttaaaatttagaaaatattttttctgaatatatttttgaaatagaccaaaaactgaaaataataaatcaacattttcagtcttgtttgaaaaggtgaaaacagcgtggtaccttagagtgctttcttcttaatacattttttttaatcttaaaaatttgaaaatgaaaataaaaaataaacgctcaaatcaagctccacctaaatttttctctattgcaaatgttgaaaaaaatggaaaagcaaaagatctcaaagtaaaataaatatattgtcttttgttacattttgtttcaatgattgtggggaataattgaggtaggataagtggtaggaaaaaatatcaagcaacggataatggtaattgttttatataaaggtttaaatatatttttagtcttttaatttaaaattattattattttttagtccttaaaaacaaatatgcaaattttagtaatctaaaattttaaaatctagttttagtcttgttttgttaactctataacagaggttgtctgtgtggaaaatgatgtgcaattttgtggcgatttctttagtgtgaaaattttgttttaaatttaaatcaaacaaaatgtctcgcaaggcaacaataacgttgttgctgctaacaatcttcgtgtggcaaaatcaacagtggagaaaacgactatcaacaatgttagagaagagttgacgaaggaaaatggggaaaataggacaaacccgaacaaaaaaaccacccttgacttg

SEQ ID NO: 88 - DNA, 1494 bp, Glycine max
atgccacagaggaatttagtactattttccacaactatggttgtgctattgctatctagcatagtgctcacacaagcacaaccacgatcatggtcagcattccaagcatccaaagaactagccacaaagcttagtcgtaaccctcaaacctttccacatgcctcaaccgattatgggcacatagttcacaaaaccccagtggcaattttcaatccatcttctgttagtgacatcttggccttgatacatttctcaaactctcttcctaacccattccccatagcccctagagggaaagcacactctgttcatggacaagccatgacaaaagatggggtggtgttgaatatgactaacctcaatagcagttttcaaaatgggttaggggttttggtgtctgcttgtgatggaaaaggtccattgatttgttatgctgatgtaggtggtggccaaatgtggatcgatgtcttgcatgcatcccttgaacgtggactcacacctttgtctttgactgattatatgtatgccactgttgggggcacactatctaatgctggcatgggtggcatgtcctttcgatttggacctcagatctctaatgttcttgaattggatgttattacagggaaaggagaccttgtgacttgctccaaggagcagaactcagaggcattttacgctgctcttggaggattaggtcaatttggggtgataacaagagcaagaatacctctaggacctgcacctactagggtaaaatggctccgcctgctatacaacaacttcactgcattttcaagagaccaagaacatttaatatcgttcagtgaaaggaatgacattgctacagcagattatgtagaaggcatgcttctattgaatcagccgccactggatcttctcttttatccagcttctgatcatcaaagggaagttgcatatttgctgaaagggttaaactttgtacatacatttgtgttcgaaagagatgtgtcatacgaggagtttgtgaacagagtttatcctttggagcaaatgcttaggtcagaaggactttgggaagttcctcacccttggctgaacctctgggttccaagatctagaatctcagattttgatgaaggtgttttcaaggacattgttcttaagcaaaatattactggcggaagttttctagtctacccaacaaacagaagaaacaagtgggatgataggatgacaccaattacacctgacgaagatgttttctacgttgtagattttttgcgtgttgctaaaacgtttgatgtggtggacaaactacaggttcaaaacaaacagatactgcggttttgtaatgatgctggtattaagatcacagagtatcttatcgggaacaaaactcatcaacaatgggtggaacactttggcccaaaatggaaactttttgcagatagaaaaactgaatttgatcccaaaaaaatattgtcacctggacatgggattttccagtaa

SEQ ID NO: 89 - protein, 497 aa, Glycine max
MPQRNLVLFSTTMVVLLLSSIVLTQAQPRSWSAFQASKELATKLSRNPQTFPHASTDYGHIVHKTPVAIFNPSSVSDILALIHFSNSLPNPFPIAPRGKAHSVHGQAMTKDGVVLNMTNLNSSFQNGLGVLVSACDGKGPLICYADVGGGQMWIDVLHASLERGLTPLSLTDYMYATVGGTLSNAGMGGMSFRFGPQISNVLELDVITGKGDLVTCSKEQNSEAFYAALGGLGQFGVITRARIPLGPAPTRVKWLRLLYNNFTAFSRDQEHLISFSERNDIATADYVEGMLLLNQPPLDLLFYPASDHQREVAYLLKGLNFVHTFVFERDVSYEEFVNRVYPLEQMLRSEGLWEVPHPWLNLWVPRSRISDFDEGVFKDIVLKQNITGGSFLVYPTNRRNKWDDRMTPITPDEDVFYVVDFLRVAKTFDVVDKLQVQNKQILRFCNDAGIKITEYLIGNKTHQQWVEHFGPKWKLFADRKTEFDPKKILSPGHGIFQ

SEQ ID NO: 90 - DNA, 3995 bp, Glycine max
tgtttacattccgacaatagtggactcagtaccaacaccataaaaaaaaataaacaactagttatgtgtccataggggcaaaagaaaaagaaatacgcactactgtggaaagaagaaaaaaagcaataaggacttatttctatatccggaaaaagcatatatccttaaattggttaatgaacaaaaacttgaaacatgtctttccttcatgtttttgttgtaacttataacataacatgtaattgtttgtggttaccactgtttggaaaaagttgaagatttgtgagatctctcattgatgttacttttcctcttcaacttggcttctgtgtcactgtacatgtgatgcctttggcgtctctcttccttccaagtaagcagtccacatacgcattctcctcgtatcgtatgtcataagtcatgactgatcaacaatgctacgttgaccaagccaccacccacaaactcctttaaattctggcccaaacccttaagttcctgcattctccaatccatcactttctccttttcctcgtgttcacaaaatcacgctgcttaattattccttcaactaccatcatatcataccttctcaacagaaaaataaaaataaaaatgagatacatccttggagaacacaacattctgttcctcaaaagcttcgccttcacgatattattccttagttgcatagccattcggcttaacttgtgtctttccagcatcccttcttcactgaaatcaattccccttgaagggcatttaaaatttgatcaagttagcctaagccatgcagcaagggactttggcaacaggtaccaatataatccaatggcagtgctgcaaccagaatcagtttctgatattgtagccaccataaggcatatctggctgatgggtcctggctcccacctcaccattgcagcgaggggccacggccactcgctgcagggtcaggctcaagcccatggaggacttgtgatcaacatggaatcactcaaggtcccagaaatgcaggtatatcgctaaatattaattgttaatcgttaattttttgttagctaggcaatcaaatccacaatcttttcctctcttccttcttcttatacaaccaaactaaccttataactccaatgcagatacatgttgatgagggaaacaagtctcctccatacgtggatgtctcaggtggcgagttgtggataaacatattgcatgagactctaagatacggcttggcgccaagatcgtggacagactacctgcatctcacagttggtggcactctctccaacgctggtgtcagtggtcagacatttaggcatggtccccagataagtaatgtacagcagctcgagattgttacaggtttgtgaaaaagagaatgaataataattgtttgtcttttctgaataataattcatttgatactggctgcatataagttttctaataaataatttttttcccctactttgatgagtaaaacatggtcaatgaatggatgcaggaacaggggaggtgttgaactgttccgcggagaataatggggatctctttcatggtgttctaggggggcttggccaatttggcattataacccgggcaagaattgtcctagaaccagcacctaccatggtaatgcatcactcatcagtgactataccaaaacaagcttctttttttttggttttaatgtgtgctttgggtcatgactgaaaattttctatttattggaacaggtaaaatggattagagtgctgtactcagatttcacagcattcacaagagaccaagagaggttaatatctgcagaaaagacttttgactacattgaaggatttgtgataataaacagaactggtcttctaaataactggcgattatccttcaacccacgagacccggtccaagctagtcatttcaagtcggatggaagaactctcttctgccttgaaatggccaaatacttaaacgtggaagaaatcgatgcagcaaatcaggtgaggccagcaacactcaatctaatagatttttttgaaaataaagggataattaactccaaggttttaaaatatgagaccgtgggttgcaacatcaaagttttctaactctttgcgacccgaattgagactatgtcgatagcatttgtctatgatttgcccgtgatatcaacaaacacgaccaaaccacatgcgactgcgacctatatttaaaaccttgattaactcattagtgataatctttctttaggaaagaaaataaaagaggctaaatcaaccgtatctcacttttgtgtgtgcaggaagttgaggaacatttgtcccgtttaagctacatcccatcaactcttttttcaacagaagtcacatttgtagatttcttagacagggtgcacatatccgaggtcaagttgcgttcaaaaggcttgtgggatgttccacatccatggctcaatcttctaatacccaaaagccaaatactcaactttgcacaagtcgtcttcgggaacatcctatcagaaactagcaacggccccgtccttatctacccagtaaacaaatcaaagtaatgaatggttcagaaaaaaacatactattaactctagaaacaaatattttagccgtcaatattttttaattgacatgttttgttttgtttgcaggtgggacaacagaacttctgttgtgattccagaggaagatattttctacttagtggcatttcttacatctgcagttccatcttcaaatggaactgatggcctagaacacatactaagtcagaacaaaagaatattagaattctgtgaaagagcacaacttggagtgaagcagtatttgccccactacaacacacagcaagaatggagggcccattttggtcctcaatgggagacttttctgctgagaaagtccgtttatgatccattagcaatactcgcccctggccaacgtatatttcaaaaagcaataaccttctcatgaccacatttttattattaattattaaaaatctgaaaaaaaaaaagagaagaaaagtccttcatggcatgtgccaaaatgaaaaaaaaatgttatatgatccagacaggttttgacattgaccatacagaatgcaattgcaaaggaagaaggttcattgatagtagagaaaaagagggagaaaaagagattacaaaatgatgactggtgagatttgtatgccttgcaggttaatgaggaaagttgtcagtgtatgtaggtatgtaccattactgatggaaaaattgccttacgtgctgagtgtagcaccaaggcagcagggtccggctgagattagatcaacaaaacacattaatcattgtagggtttccaaagaacttataaatattatcagcgctagagccaatgtatagtactatcaattttgtaaacactcccttatttgttctctgtctcacatgtatccaaattcattaagattataattaaatacagatatttatgcatccaccacaaaaagatatcaatacgttcgcaacaaatacagataagatgatatataatgctgagtaacaaatactactattctagaaaattgcggaaaatgatataaaaatgggtatgcctaccctgaaggatgatgaatatcagtccacggcaatctataacttactgccagtgatagtatgtgagagcagataagacatagtgatgccatatatccatatcactgaaaataaggtgtgtgtgtgtgtgttttggtgatatataattgataaactaaaaaataaaatcgtagcattagtacaattatacactcataaatcatggtctacttcttgcacaaaagcaaccattcatgaaaaatgtgataaataactaacaacaacaaagtttgtttttaggttttaacctctgctcttttggctgcactttgtctaaatgaagcaacataagtcaactcatcagtgaaggcagaactaatctagtgtgtttttgctactgtcagaa

SEQ ID NO: 91 - DNA, 1605 bp, Glycine max
atgagatacatccttggagaacacaacattctgttcctcaaaagcttcgccttcacgatattattccttagttgcatagccattcggcttaacttgtgtctttccagcatcccttcttcactgaaatcaattccccttgaagggcatttaaaatttgatcaagttagcctaagccatgcagcaagggactttggcaacaggtaccaatataatccaatggcagtgctgcaaccagaatcagtttctgatattgtagccaccataaggcatatctggctgatgggtcctggctcccacctcaccattgcagcgaggggccacggccactcgctgcagggtcaggctcaagcccatggaggacttgtgatcaacatggaatcactcaaggtcccagaaatgcagatacatgttgatgagggaaacaagtctcctccatacgtggatgtctcaggtggcgagttgtggataaacatattgcatgagactctaagatacggcttggcgccaagatcgtggacagactacctgcatctcacagttggtggcactctctccaacgctggtgtcagtggtcagacatttaggcatggtccccagataagtaatgtacagcagctcgagattgttacaggaacaggggaggtgttgaactgttccgcggagaataatggggatctctttcatggtgttctaggggggcttggccaatttggcattataacccgggcaagaattgtcctagaaccagcacctaccatggtaaaatggattagagtgctgtactcagatttcacagcattcacaagagaccaagagaggttaatatctgcagaaaagacttttgactacattgaaggatttgtgataataaacagaactggtcttctaaataactggcgattatccttcaacccacgagacccggtccaagctagtcatttcaagtcggatggaagaactctcttctgccttgaaatggccaaatacttaaacgtggaagaaatcgatgcagcaaatcaggaagttgaggaacatttgtcccgtttaagctacatcccatcaactcttttttcaacagaagtcacatttgtagatttcttagacagggtgcacatatccgaggtcaagttgcgttcaaaaggcttgtgggatgttccacatccatggctcaatcttctaatacccaaaagccaaatactcaactttgcacaagtcgtcttcgggaacatcctatcagaaactagcaacggccccgtccttatctacccagtaaacaaatcaaagtgggacaacagaacttctgttgtgattccagaggaagatattttctacttagtggcatttcttacatctgcagttccatcttcaaatggaactgatggcctagaacacatactaagtcagaacaaaagaatattagaattctgtgaaagagcacaacttggagtgaagcagtatttgccccactacaacacacagcaagaatggagggcccattttggtcctcaatgggagacttttctgctgagaaagtccgtttatgatccattagcaatactcgcccctggccaacgtatatttcaaaaagcaataaccttctcatga

SEQ ID NO: 92 - protein, 534 aa, Glycine max
MRYILGEHNILFLKSFAFTILFLSCIAIRLNLCLSSIPSSLKSIPLEGHLKFDQVSLSHAARDFGNRYQYNPMAVLQPESVSDIVATIRHIWLMGPGSHLTIAARGHGHSLQGQAQAHGGLVINMESLKVPEMQIHVDEGNKSPPYVDVSGGELWINILHETLRYGLAPRSWTDYLHLTVGGTLSNAGVSGQTFRHGPQISNVQQLEIVTGTGEVLNCSAENNGDLFHGVLGGLGQFGIITRARIVLEPAPTMVKWIRVLYSDFTAFTRDQERLISAEKTFDYIEGFVIINRTGLLNNWRLSFNPRDPVQASHFKSDGRTLFCLEMAKYLNVEEIDAANQEVEEHLSRLSYIPSTLFSTEVTFVDFLDRVHISEVKLRSKGLWDVPHPWLNLLIPKSQILNFAQVVFGNILSETSNGPVLIYPVNKSKWDNRTSVVIPEEDIFYLVAFLTSAVPSSNGTDGLEHILSQNKRILEFCERAQLGVKQYLPHYNTQQEWRAHFGPQWETFLLRKSVYDPLAILAPGQRIFQKAITFS

SEQ ID NO: 93 - DNA, 177 bp, Glycine max
acatacttcatcctcctgttcataaccataacacgtttgatctccacagtgggcaaaacctcccaatggacgaaggccctgtcgctgcctccggaactcgcctccgtctccctcgacgacaccatcttctgcaagctccgtgacgacccagaggccctccagggaagggcctccagg

SEQ ID NO: 94 - DNA, 153 bp, Glycine max
tcctcctgctcataaccataacacgtttgatctccacagtgggcaagacctcccaatggatgaaggccctaacgccgcctccggaactcgcctcggtctccctcgatgacaccatcttcagcaagctccgcaacgacccagaggccctccagg

SEQ ID NO: 95 - DNA, 135 bp, Glycine max
tactactgctagtaaccataacccgtttgatattcactgtgggaaaaactgagcaatggaaagctccgattctaccagagcttgacattgataacatatcccacaaactccatgatgaccctgaaaccattcaaa

SEQ ID NO: 96 - DNA, 150 bp, Glycine max
tggctgtcaacaacaacaagcttgttctgttaacattcgccatatgccgtttaatagtaactgtgggattaacggtggtcccggagctgctcgatgtgggactccagggtcgtctcagcgtggacacgttggaactggaggcggcttcgg

SEQ ID NO: 97 - DNA, 101 bp, Glycine max
agcttcgccttcacgatattattccttagttgcatagccattcggcttaacttgtgtctttccagcatcccttcttcactgaaatcaattccccttgaagg

SEQ ID NO: 98 - DNA, 148 bp, Glycine max
acaactatggttgtgctattgctatctagcatagtgctcacacaagcacaaccacgatcatggtcagcattccaagcatccaaagaactagccacaaagcttagtcgtaaccctcaaacctttccacatgcctcaaccgattatgggc

SEQ ID NO: 99 - DNA, 23 bp, Artificial Sequence
  Synthetic oligonucleotide
tcctcctgttcataaccataaca

SEQ ID NO: 100 - DNA, 23 bp, Artificial Sequence
  Synthetic oligonucleotide
tgacgacccagaggccctccagg

SEQ ID NO: 101 - DNA, 23 bp, Artificial Sequence
  Synthetic oligonucleotide
acatacttcatcctcctgttcat

SEQ ID NO: 102 - DNA, 23 bp, Artificial Sequence
  Synthetic oligonucleotide
tcctcctgctcataaccataaca

SEQ ID NO: 103 - DNA, 23 bp, Artificial Sequence
  Synthetic oligonucleotide
caacgacccagaggccctccagg

SEQ ID NO: 104 - DNA, 23 bp, Artificial Sequence
  Synthetic oligonucleotide
ggaggcggcgttagggccttcat

SEQ ID NO: 105 - DNA, 23 bp, Artificial Sequence
  Synthetic oligonucleotide
tactactgctagtaaccataacc

SEQ ID NO: 106 - DNA, 23 bp, Artificial Sequence
  Synthetic oligonucleotide
tgatgaccctgaaaccattcaaa

SEQ ID NO: 107 - DNA, 23 bp, Artificial Sequence
  Synthetic oligonucleotide
acagtgaatatcaaacgggttat

SEQ ID NO: 108 - DNA, 23 bp, Artificial Sequence
  Synthetic oligonucleotide
tggctgtcaacaacaacaagctt

SEQ ID NO: 109 - DNA, 23 bp, Artificial Sequence
  Synthetic oligonucleotide
ccgaagccgcctccagttccaac

SEQ ID NO: 110 - DNA, 23 bp, Artificial Sequence
  Synthetic oligonucleotide
tcaaaagcttcgccttcacgata

SEQ ID NO: 111 - DNA, 23 bp, Artificial Sequence
  Synthetic oligonucleotide
ctgaaatcaattccccttgaagg

SEQ ID NO: 112 - DNA, 23 bp, Artificial Sequence
  Synthetic oligonucleotide
acaactatggttgtgctattgct

SEQ ID NO: 113 - DNA, 23 bp, Artificial Sequence
  Synthetic oligonucleotide
acatgcctcaaccgattatgggc

SEQ ID NO: 114 - DNA, 5742 bp, Artificial Sequence
  Synthetic polynucleotide
ataaatggtagaaatctgtgggttcaaatgttcaattgctggggatcttcgtgatcatgatgattcatacacaatctctagaaacacgtacgcaaatattaattaatcaatttcctttttatagtctcctcacaattcacatgaaacttcatactctattatccgattccatttccatcgtatctttgaatttgacatttgtttgcccaacatgtaattaactttcccttctcatcttaaagatgtaacatgatatatattataacttgtaattaacccaatatttttaactctctatttttacactcatctgacatgtatttttatttttcatttttttttcttatcacatcacctcttacgtgtacaatttttctctttttcttatttctgtcttccataatagtaattaatattcatcggtccgatatgtatacagcccaaaaaagtgtgtaaaatcatttttgtatttctaaccctctctttctcatgcaagctagcttcttctttctatttatagcccttctcccttcacccaccaacacaccacaactccaaactttttcctcttgttctcttcttcttcaacacaactagtcataatccagctcatctctctctccctctctctttgttctctctttctctttctccaaaatggctctaaactacccttttttaacctacttcatactactgctagtaaccataacccgtttgatattcactgtgggaaaaactgagcaatggaaagctccgattctaccagagcttgacattgataacatatcccacaaactccgcttcaagggactatggccatttaacgcatgaattcccattagctgtgtttcgtccatcttctatagatgacatagtcaccttgataaaatcttcgtacaatagctttgccccttttgacatagctgcgaggggccaaggccactccactcatggacaagccatggctcgtgatgggattgtggtggacatggccagcctaagaaaacaaagaaatggggttgcgattagtgtctctaaggaccctttgatgggtcactatgctgatgttggaggggaacaactctggattgatgtgctacatgccacacttgaatatggacttgcaccagtttcttggactgattatttgtacttgaccgtgggagggacactttctaatgctggaatcagtggccagagcttccgttatggacctcaaatcagcaacgttcatgaaatggatgtcatcactggtatggagttagttgttttttttaatcaataaatgttaatattattagcttgttagttttttttgaaaaaattgaattaactttcgtttcctcttttctttctttttttaaccacacaattaatctaataactactggtattaagttagtttattttccatttttcatatataagttaggatttctaattaaaattgacatttcgtaccaccactacaaaaaaataatgtatcagtggcacaaaaaaatatattggcatcacttgtttttttagtcattaatattttgtagcatcacaaaaaatatggtgacaagttttctaaaaattacaaattaactgattcgtcagtgatgttaatgattttttagtgcgtcttggcaactaatgttttcatcttatataaaattagaaacaatagcggcaacagcacctgacattgtgtttgtgttttgcgtgtttctatcgcctaatttttgttgagaacgtgttcgtgaaacttggaaaaagagaaaattgaaattttcttgagatatctaccacttaagaaaaacaaatggctgtttccgttttgtctcttatgacatgacatggtacgtcatagatgaagttctgctaaatatatttgatatgatttcttgaacacgttttatatattcccacttcccagttagtgtggttgttgaatctaattaaaacaggaatagtctttgtctacaatatgggtgagcgatgcaaactttccaagggtttagaagttagaactatataggtccacggtcataattttatattcttgattaactttatgttggttaagtcgttcatatttggtcaattcattcatatgagaaaatactgaaatacaaacatggaaaaatgttaattactcttataattggcgcatgcatgcatctaaattatatgattttaataaatagtttttgtcatctacttgatttcaggaaaaggagagttcgtaacatgctcttcacagaagaacttggagttattccacgcggttcttggaggcttgggacaatttggagttatagcaagggcgagaattgctcttgagccagcacccaaaagggtacgtttatagagaattgactagaattttgtcttgtagcttttcctccaccaattcatatagtgacacctaatcgaattgtcatttttttttacggtgaattgtcattttgtaaatctaccaagtggtagttggcacccatatatgtatgaactatagtaccatacatttcattttatgttggtgtgttagtcatccatgatgaacacatacacaaatgaaaataggacgagttatacgtacgtaagggtttgaatcactgaatgtggatttttgaagttgaaagcatattaatcttggtttgaaaaagaaaaaaaaaatcggaagtccctcttgaagttatcatgactcttatattaagccaatagaattagaaaaactataattatgaatgatcatgttaattctttcagtgacttaaaatcttatctacaaaaagtacccttttgaaaaagaccttcacttaagtccatgcatacagtactaatcttacatacttgagagttgagacttgaagcatgaggagatttgaagtctggagaaacaagccaccacatattaattactaccgtattcttatctttatttatccttccaattttgatgggactggttgcacatacattcatacatactaacatacataaatacgtctctctctcatgtatttcattttattatattctatttcgttagtaagtttactagtataagacattattaatggtgaatttttgttggcatgcaggttaagtgggtcagactactttatagtgacttttctgcttttaccaaagaccaggaacgattaatctcaatcaatggaaggaaacaaaagaacgcattggattttctggaagggatgctgctaatgaaccaaggccccataaataattggagatcctctttcttccctctatctgaccatcccagaatagcttctttaataactgaacatagcatcctctactgtcttgaagtggctaaatattatgacgaacaaaccgagttaaatgtggacaaggtaacctcgtctagtcatatctattatatatagttagatcttgtcacatttctttgtttaaaaaataaaataaaaggcacaatcccaaaaagtcaaaagcaaatgcctagatattgtgtgttttcttggatattaattattacaccttaataacccataataatttttttatttttctttgtctctgtaggaaattgaagttttgctccaaggactagcctatatccctggatttaattatgagaaaaatgtctcgtacgttgagttcttgaatagggtccgaagtggagagttgaaacttcagtcacaaggactgtgggaagttcctcacccgtggcttaatttgtttataccaaaatctcaaatcttggattttaattcaggagtattcaaagatatagttcttaaaagaaacatctcctctggaccagtcttggtttatcccatgaatagaaacaagtaagccttgaatgcatgaatcacaatctagtgtcattataattcaggagtgtgtgatgcaatcttttaattttctgaccattcaactcaatatcaattttatttcttttttcaattaaaatgcaaaagagaataataattaataatatgaaatttaattccaggtgggacgataggatgtcagcatctataccagacgaggatgttttctacacagttgggtttttgcactcaagtgggtttgatacttggaaggcatatgatgctcaaaacagagaaattttggagttctgtagagatgctggcatcatggtcaagcaatatcttcccaaccacagcacacaagaagattggacaaaccattttggtgctaaatggatgaaattcttagaaagaaaacatcagtttgatccaagaatgattctatcacctgggcaaaaaatcttccacaaaaaattacagccagtgttttaaatattttccctaataaaaaaagtaaaaatgttttgtggtgggactacctcaattagatggctagctagggacaggtgtacatacagtgtgaccaagaccaagatggcttttgtatgctaaagtttgcattgctagctagagaaattaataaggtggggcattaaaggctgcatgagtacttttggcacctattatgctacatattaccttagatacgttaggttgacaaagtcgtactggtaggtacaagaagcacagttgtctctcacactgtctgtcacccaacttgctatatagtgtgtggagaaattcggatcatattgaagatgctgtgagttatagtcctccaatattaaatgtttaacgattctgtctttctcttatataattttgttttgcattatattactttcgcactggtgcaaacatatatatcaatgattataattaatttatacaatgacgagtataattgtacccaagttgcatgccataatatttgtcaaaaacaaaaagttgtatgccataatcaatccaggttgctagataataagatagatatgaatatgataacataaaatgctattaaagcaacaaataaacaataacacatagtccttatagggttcataattgatcgatgaacctagctagacgttgattttaggttaatttccagcgaggataaaatttattatataaagaaataactaaccaacacaaaataataaaaaattaaaaaaaaacgaagaaacttattttagagatataatttgttttagtatttgattgtaatttgagagattagctaggctctcaccaagtgagatctagagtatattcttaagaaaatatttataataaagaacccttaaacattttgcaaaacaaagggtggaattaatattaacaacaataattataatatcttgaaaattttatgaaaataatatatatatatatatatatatagagagagagagagagagagagagaaaattctcacaaacaatttttatctgttatttcaaattggtgtatgactccttagtccttagttcatttgtttgcacccagtcctgtcttaggtagttgattttatagttaggtaaattaatttctcgcactcttcgcttgattgtcatttatgggttgaactgttgaagtgattttatattttttaataaatttcacctgcaaaaaaactcaccattagcatacgccccccccccccccccccccccctctcccaaaaaaaaaaaaaaaacgaaagaagattaattagaaagaataaggtcgtgaaatgatgttacaaataaggcatatcagaatcagacgcaagggaagaataaaaacgttacaacaattcgcgcacaatgcaccccaaaaaaaaaatgacaggcacacataccttaaggaagaagaatcaacgctttca

SEQ ID NO: 115 - DNA, 7397 bp, Artificial Sequence
  Synthetic polynucleotide
ttaaatcggttcaaaattgttgaatcgatccaaaactagtaaatacagtaggttaattgatttcacttgaaatttaaaaaaaaaaaattaaaatgacgtcattttagtttttttttaaattattataacttatatgacatttttaagtgaagtttactttttattattattaatttatgcatactaggtttctgaaatattatattaaaatattatatatatatatatatatatatatatatatatatatatatatatatatatatatatatatatattattaaaatcaattccacttcgattgagctattaacttttgaaccaatatcttccccagttcaatgaccatccaagtctgaaaacattggttaccatcaacgttacccttccgtgaattggaaaagttaatgcaatataggttgatccaaggataagtcctatggtcccagaaagaaaatcttgagagatccttttgataattacccgagtttttactctctccttttaattcacgaaattggaaacttcaattgctaatataaaaagaattttgttagccaatatcatcagggtattgtcaaagaattacaagaaaaaaaaattataagataacataaaaaaataaaaaacaacataattttatatattttaataaaaaattcttttaatttttttttatcaatattctatagttactggcatttgacatgtaaaaatgtaaacatatgaattgataaaatttgaccaatgtttgaccctgagataggaatccaacggccccagttcaattgcaatcttttatttttactacgtgaaggcccaacaatggagaaccttgtggattttattgctgagaatctgtggttacgatgatgacacaccaacacaatcacagaaagcaagtaccgtttggaaggcctaacacttcattaattgcttcattaaatttattttactttctagctgctcaatttaattgctttacacaaatacttcatgacgtttcagaaggagggccaaatacaatctctacaatggttccatcgtatctttgaatttgacatttagcatccctccctttgcacaatgtacaatttgcattttgaatatttttttctcaccttcatatcgtgggactacttctataaccatcctggtgaaaataaataaagcgagggaattacgtaattaaacatatttaaatttctctctcctctgtttaattaatttatcaaaaacaaatatgtgtgcgagtatttaaaaatgtgtaaagtattattattttttaatttttcttttttccttctcatcaatgataaatatactttttaatataaaaatcaaacaataactataaaaaaaacatcttcacttcaattcaacattaaataaaaaataatccctgctttgttattttttacccaccaattatcatatttgttatttattatttttttatgttcttgctataaaggaaatcactatttgactcacacaaaactataaaggaatcaaataatcaattattatttaaaaactctattaaaataacaattacaacaaaatcccttatttttttcttccttatcattattaaaccttcccattctctctttctatctctacatgtttttctcaaattaaatattttctatatcctcctttatcatgcaaattaaagtcctcttccattctatatatagccgctacctcctccacctcctttccccactacaacacacaaacaccaacaaccaaatcaatccatccaccctagaaacaacaaagcactctctcttctctcattctattatcttctctcatcctcttattctctccaaaccaacaaaaaaaaaatggttgctgagaactacccttctcccacatacttcatcctcctgttcataaccataacacgtttgatctccacagtgggcaaaacctcccaatggacgaaggccctgtcgctgcctccggaactcgcctccgtctccctcgacgacaccatcttctgcaagctccgtgacgacccagaggctccagggaagggcctccagggactacgggaacctcgtccgcgaggttcccttggcagtcttccacccagcctcagcgagcgacatcgcgaggctgatcaagctgtcgtacaacggctctgtccccttcaagattgcggcgagggggcaagggcactcgacaaggggccaggcgatggcacgtgagggggtggtggtggacatggcggggttcagagagagagggaatggagtggggataagggttgtgagtagtgtggaccctaataataagaatggttactactattatgcggatgttggaggggaacagttgtggatcgatgtgctacacgccacgctcgagcatggacttgcacctatgtcctggactgattacttgtacttgacgctgggagggactctctccaatgctggcatcagtggccagacattccgctatggtcctcaaatcaccactgtccgggaaatggacgtaatcaccggtaagaaaactttccattcaaccagttaacttacatgtttttagttttttagcttccaatatccaatagtttataacttgtaagcttcaattttatgttaatttataagctagttttaccctacttttgaaaattcaaggattttggtactacaataactcccttgtcaaactcgttcaattgttggcttagtatcaagtagactcttggatttttaggtgtactttaacaaccatgttaatttaattgatcagggttttaatattatggaaattggccattggacaacttggaatggaaggaaagcgggagatggaaagggaaaagaaattaattagaataattgttaatattagttgcgtgaaaaaaattaaatttgctgaattaaattatggttcatcacgactctatttgtggcaacaccaacgtgccgttttcagaacttcattgcaacagcggttatagtggcgtttattcaattcatattttaatgcatcagactgtgattgcgattgaaattttatgaaatcttgttttataaacttgttcttttgattaggaaacttgattctattttatatatatttaatgtaacgccgaattaatggttgataaacgagtctttgtctaaaattttggcgaatgttagcaagcgttttccacgtggtcccgtacgtgtttgaaaaattcttaatcatggaatcagttcacacgggcagtcatagactcatagactccaattcttgattaattgttttcttattaatattggtccatggtcttattttggtcaattctttttattaaaaataaacgggctgctgaattttaatttactcaagtgtttgttaatgaatatgtgtgcatgcatgcaattatatatatatatatatattactattatttatttgtgttttaatcaaattttggtttggttcaggaaagggagaatttgtgacttgctctcagcagacgaattcggagttgtttcacgcggttcttggaggcttaggacaatttggaattataacaagggcaagaattgctcttgcgccagctccgaagagggtacgtttaaaatcttcggaattgactaggacttgtcttgttgcttcttcctccaacatctctcatatagtaacgcaaatttctaaatatgttacattattaattcaaccaccaagctttgcggaagcatcaaatgtcgttgtcctgaaagcttcatgtcatcatttttcttggcacccatatacacacacatacgtttcacattgtgtcagtgcatattagtcatccatgaaagacacatgtacaaatgaaaacgagaggagttatattaaaatgtgtgttggaaaaatatatatcatattttcataagtcttaattttgaaattaatatacagtaaccctttgagaccttagcaattaagccaataaaaaggctcgtattaaccccaaccaacaactattagaaaatactaacaagtataggtgtatacataaatgattcatttgaattttagtaccttaattatttaactttatccttctatttgacgggactcgttgcataagccatacatacataatcatgcgttcattattgtttttcattatgagttaatgagttgattgtatgaactaatggtgaatttttgttggcaggttaaatgggtgagacttttgtacaatgacttttctgcttttaccaaagaccaggaacaactaatatctatcactggaaggaaacaaaatgtttcactggattatttggaaggattgctgctaatgcaccaaggacccataaataattggagatcttctttcttccctttagccgaccatgcccgaataatttcgctagtaactaaacacagcgtcctctattgcctagaagttgccaaatattatgatggccaaaatgaaaacaatgtggacaaggtaccatctccattcatgtgcatttgccttgatgatgtttcttctattttttcttttaatgttttgatctcaccttatataataaccctttatcacactcaatcttgttatatttttaagagtttaatgataatattatgattttgttgtgaaaaaagagagtttaattgttattatataatcacaaattatcattaatatgacttttaaaataattaataatataaaaattaataaatttatcgtatttaatgagttataattaaatgatcatataaaattattttatattattaacatatagtttttttttctatttttaatatttgttttactataagttgttatattttcaatcttttttctagtataagttttaataatcaatattgtaagtaatattctcatttttcatgttgtgtaggaactccaagttttactacaaggattgagctatatccctggattttactatgaaaaagatgtctcatattttgagttcttgaatagagtccgaagtggagagttgaagctacagtcacaaggactatgggatgttcctcacccgtggcttaatttgtttataccgaaatctcaaatcatggaatttgactcgggcgtgttcaagaatatcatccttaaacgaaacatcaccacaggacctgtcttggtttaccccatgaatagaaacaagtaattgagcttaactaactaatctcaacttatgttgttatcattaggaaaaatgttaattggtacgaaaactatatataccactattttcatttaaattcatgaaagtgaaatttctctttcctaaaacaaattctttctcttaaaatgaatttttgtttttctcaatctccatcaattacttatttccttttttgaatgtttgaaaagtcattcacaacattttcttcataaaagggttattcgtaccaatttaaatagaattgccgttattatcagatgtacaattcttctcttcactcacttcttttccattaaaattgtaaaaaaaaaataaaaaaatcaggtgggacaataggatgtcagcatcaatacccgatgaggatatcttctacacagttggatttttgcattcaagtgggtttgataattggaaggcctatgatgctcaaaataaagaaattctacaattttgtaacgttgctgggatcaaggttaagcaatatcttccccactatcgcacacaagaagattgggcaaaccattttggccctaaatggaggacttttgtagaaagaaaacaccagtttgatccaagaatgattctatcacctggacaaagaatctttaacaattaaaatagctttaaaaatatatattcccccccccccccccccccccaaaaaaaaaaaaattatataatatggtgggactacccaagttagctagctggctgatcacaagtgtgcacataggacccagaattcagatgatagcctttgtacttgtttttgttaagagggtggggttaaaagctgcatgactttggcatatatgtagatcaggttacacatactttagatacgttaggttgacaaaatcatgtgtgaaataagatgcacacagctagctgtgtacctttctttctctctgtccctcaatttgtctatcactaaaaagatttctatatagtttagaacctagtgaagagaaagaaaaaaccattatattgaggatttaattttatcacgttctaatcctatacattaatattcttaaatgtgcaatgagtgtgctcggtgccttaatgattctttatctttgttaattgttatattgtagggttttgtttttgccttcctaattttgtaacaggggcacccctagcaataattgagatcctaggttaactaaggaacagcattattgtgtctaaattgagattcctagctgtatgccataataataaatcatcgtaggttgctagatagatgtgatagcgccaaatgccttccaatactataatctccattgcaagatccttcgttgtgattgtgtagaaaagattacgctgctttacaagagaatactccaagaaagcaagtgattgctccttaatataaagaatcatgcaataaacaaatggtgtcgtaatccataaagtgtatttaatatttgatgaaagagtagtgtagacatcaaacaaaataaagtttgatgcaattcgaattatagatacttgattaatctctaaattatgttgagacaatcatatttgaatttgataagactattatgaacgataaaaaatattataaataataaaaaaatttcatcaaacatttaatacaattatataccttactcaaatttgaaaacctgtacatataggaaaaaaacctttactaaaagaggttaaactcaccatacggatttttatatgtcgaagggatctttaattgtccatcggaaaacatcctaattcataaaaaaggaaagaaagtttagacatgaataattacggaccaatgaatgcaacctacgtctctcaattttaaggagaatttaggaatattatagtatatcactgaaagtacacacaagtggcaatgatgaatattttaatttaaagttttaattggattcgaaattaatcccttcttttttccagaaaaaataataatcatcgagtaatcaagacaatttcccaagtagacaacaagaatacaaaagagaatacgtgacttcgtttcaccatagaaaagaaggaatgcaataacgatgataataattataaaatgaaattgacaaaatatctaaatgcctgtagatatttctacagcgaatgataagtgtttttccattaaaaataagtttcttttgttaagaatttctaacatttttagttccaaaatataggaatgaagccaataagtaagtaagaatttctaacgtctgaaag

SEQ ID NO: 116 - DNA, 5763 bp, Artificial Sequence
  Synthetic polynucleotide
ataaatggtagaaatctgtgggttcaaatgttcaattgctggggatcttcgtgatcatgatgattcatacacaatctctagaaacacgtacgcaaatattaattaatcaatttcctttttatagtctcctcacaattcacatgaaacttcatactctattatccgattccatttccatcgtatctttgaatttgacatttgtttgcccaacatgtaattaactttcccttctcatcttaaagatgtaacatgatatatattataacttgtaattaacccaatatttttaactctctatttttacactcatctgacatgtatttttatttttcatttttttttcttatcacatcacctcttacgtgtacaatttttctctttttcttatttctgtcttccataatagtaattaatattcatcggtccgatatgtatacagcccaaaaaagtgtgtaaaatcatttttgtatttctaaccctctctttctcatgcaagctagcttcttctttctatttatagcccttctcccttcacccaccaacacaccacaactccaaactttttcctcttgttctcttcttcttcaacacaactagtcataatccagctcatctctctctccctctctctttgttctctctttctctttctccaaaatggctctaaactacccttttttaacctacttcatactactgctagtaaccccgtttgatattcactgtgggaaaaactgagcaatggaaagctccgattctaccagagcttgacattgataacatatcccacaaactccatgatgaccctgaaaccattcaaatggcttcaagggactatggccatttaacgcatgaattcccattagctgtgtttcgtccatcttctatagatgacatagtcaccttgataaaatcttcgtacaatagctttgccccttttgacatagctgcgaggggccaaggccactccactcatggacaagccatggctcgtgatgggattgtggtggacatggccagcctaagaaaacaaagaaatggggttgcgattagtgtctctaaggaccctttgatgggtcactatgctgatgttggaggggaacaactctggattgatgtgctacatgccacacttgaatatggacttgcaccagtttcttggactgattatttgtacttgaccgtgggagggacactttctaatgctggaatcagtggccagagcttccgttatggacctcaaatcagcaacgttcatgaaatggatgtcatcactggtatggagttagttgttttttttaatcaataaatgttaatattattagcttgttagttttttttgaaaaaattgaattaactttcgtttcctcttttctttctttttttaaccacacaattaatctaataactactggtattaagttagtttattttccatttttcatatataagttaggatttctaattaaaattgacatttcgtaccaccactacaaaaaaataatgtatcagtggcacaaaaaaatatattggcatcacttgtttttttagtcattaatattttgtagcatcacaaaaaatatggtgacaagttttctaaaaattacaaattaactgattcgtcagtgatgttaatgattttttagtgcgtcttggcaactaatgttttcatcttatataaaattagaaacaatagcggcaacagcacctgacattgtgtttgtgttttgcgtgtttctatcgcctaatttttgttgagaacgtgttcgtgaaacttggaaaaagagaaaattgaaattttcttgagatatctaccacttaagaaaaacaaatggctgtttccgttttgtctcttatgacatgacatggtacgtcatagatgaagttctgctaaatatatttgatatgatttcttgaacacgttttatatattcccacttcccagttagtgtggttgttgaatctaattaaaacaggaatagtctttgtctacaatatgggtgagcgatgcaaactttccaagggtttagaagttagaactatataggtccacggtcataattttatattcttgattaactttatgttggttaagtcgttcatatttggtcaattcattcatatgagaaaatactgaaatacaaacatggaaaaatgttaattactcttataattggcgcatgcatgcatctaaattatatgattttaataaatagtttttgtcatctacttgatttcaggaaaaggagagttcgtaacatgctcttcacagaagaacttggagttattccacgcggttcttggaggcttgggacaatttggagttatagcaagggcgagaattgctcttgagccagcacccaaaagggtacgtttatagagaattgactagaattttgtcttgtagcttttcctccaccaattcatatagtgacacctaatcgaattgtcatttttttttacggtgaattgtcattttgtaaatctaccaagtggtagttggcacccatatatgtatgaactatagtaccatacatttcattttatgttggtgtgttagtcatccatgatgaacacatacacaaatgaaaataggacgagttatacgtacgtaagggtttgaatcactgaatgtggatttttgaagttgaaagcatattaatcttggtttgaaaaagaaaaaaaaaatcggaagtccctcttgaagttatcatgactcttatattaagccaatagaattagaaaaactataattatgaatgatcatgttaattctttcagtgacttaaaatcttatctacaaaaagtacccttttgaaaaagaccttcacttaagtccatgcatacagtactaatcttacatacttgagagttgagacttgaagcatgaggagatttgaagtctggagaaacaagccaccacatattaattactaccgtattcttatctttatttatccttccaattttgatgggactggttgcacatacattcatacatactaacatacataaatacgtctctctctcatgtatttcattttattatattctatttcgttagtaagtttactagtataagacattattaatggtgaatttttgttggcatgcaggttaagtgggtcagactactttatagtgacttttctgcttttaccaaagaccaggaacgattaatctcaatcaatggaaggaaacaaaagaacgcattggattttctggaagggatgctgctaatgaaccaaggccccataaataattggagatcctctttcttccctctatctgaccatcccagaatagcttctttaataactgaacatagcatcctctactgtcttgaagtggctaaatattatgacgaacaaaccgagttaaatgtggacaaggtaacctcgtctagtcatatctattatatatagttagatcttgtcacatttctttgtttaaaaaataaaataaaaggcacaatcccaaaaagtcaaaagcaaatgcctagatattgtgtgttttcttggatattaattattacaccttaataacccataataatttttttatttttctttgtctctgtaggaaattgaagttttgctccaaggactagcctatatccctggatttaattatgagaaaaatgtctcgtacgttgagttcttgaatagggtccgaagtggagagttgaaacttcagtcacaaggactgtgggaagttcctcacccgtggcttaatttgtttataccaaaatctcaaatcttggattttaattcaggagtattcaaagatatagttcttaaaagaaacatctcctctggaccagtcttggtttatcccatgaatagaaacaagtaagccttgaatgcatgaatcacaatctagtgtcattataattcaggagtgtgtgatgcaatcttttaattttctgaccattcaactcaatatcaattttatttcttttttcaattaaaatgcaaaagagaataataattaataatatgaaatttaattccaggtgggacgataggatgtcagcatctataccagacgaggatgttttctacacagttgggtttttgcactcaagtgggtttgatacttggaaggcatatgatgctcaaaacagagaaattttggagttctgtagagatgctggcatcatggtcaagcaatatcttcccaaccacagcacacaagaagattggacaaaccattttggtgctaaatggatgaaattcttagaaagaaaacatcagtttgatccaagaatgattctatcacctgggcaaaaaatcttccacaaaaaattacagccagtgttttaaatattttccctaataaaaaaagtaaaaatgttttgtggtgggactacctcaattagatggctagctagggacaggtgtacatacagtgtgaccaagaccaagatggcttttgtatgctaaagtttgcattgctagctagagaaattaataaggtggggcattaaaggctgcatgagtacttttggcacctattatgctacatattaccttagatacgttaggttgacaaagtcgtactggtaggtacaagaagcacagttgtctctcacactgtctgtcacccaacttgctatatagtgtgtggagaaattcggatcatattgaagatgctgtgagttatagtcctccaatattaaatgtttaacgattctgtctttctcttatataattttgttttgcattatattactttcgcactggtgcaaacatatatatcaatgattataattaatttatacaatgacgagtataattgtacccaagttgcatgccataatatttgtcaaaaacaaaaagttgtatgccataatcaatccaggttgctagataataagatagatatgaatatgataacataaaatgctattaaagcaacaaataaacaataacacatagtccttatagggttcataattgatcgatgaacctagctagacgttgattttaggttaatttccagcgaggataaaatttattatataaagaaataactaaccaacacaaaataataaaaaattaaaaaaaaacgaagaaacttattttagagatataatttgttttagtatttgattgtaatttgagagattagctaggctctcaccaagtgagatctagagtatattcttaagaaaatatttataataaagaacccttaaacattttgcaaaacaaagggtggaattaatattaacaacaataattataatatcttgaaaattttatgaaaataatatatatatatatatatatatagagagagagagagagagagagagaaaattctcacaaacaatttttatctgttatttcaaattggtgtatgactccttagtccttagttcatttgtttgcacccagtcctgtcttaggtagttgattttatagttaggtaaattaatttctcgcactcttcgcttgattgtcatttatgggttgaactgttgaagtgattttatattttttaataaatttcacctgcaaaaaaactcaccattagcatacgccccccccccccccccccccccctctcccaaaaaaaaaaaaaaaacgaaagaagattaattagaaagaataaggtcgtgaaatgatgttacaaataaggcatatcagaatcagacgcaagggaagaataaaaacgttacaacaattcgcgcacaatgcaccccaaaaaaaaaatgacaggcacacataccttaaggaagaagaatcaacgctttca

SEQ ID NO: 117 - DNA, 5701 bp, Artificial Sequence
  Synthetic polynucleotide
ataaatggtagaaatctgtgggttcaaatgttcaattgctggggatcttcgtgatcatgatgattcatacacaatctctagaaacacgtacgcaaatattaattaatcaatttcctttttatagtctcctcacaattcacatgaaacttcatactctattatccgattccatttccatcgtatctttgaatttgacatttgtttgcccaacatgtaattaactttcccttctcatcttaaagatgtaacatgatatatattataacttgtaattaacccaatatttttaactctctatttttacactcatctgacatgtatttttatttttcatttttttttcttatcacatcacctcttacgtgtacaatttttctctttttcttatttctgtcttccataatagtaattaatattcatcggtccgatatgtatacagcccaaaaaagtgtgtaaaatcatttttgtatttctaaccctctctttctcatgcaagctagcttcttctttctatttatagcccttctcccttcacccaccaacacaccacaactccaaactttttcctcttgttctcttcttcttcaacacaactagtcataatccagctcatctctctctccctctctctttgttctctctttctctttctctaacccgtttgatattcactgtgggaaaaactgagcaatggaaagctccgattctaccagagcttgacattgataacatatcccacaaactccatgatgaccctgatggcttcaagggactatggccatttaacgcatgaattcccattagctgtgtttcgtccatcttctatagatgacatagtcaccttgataaaatcttcgtacaatagctttgccccttttgacatagctgcgaggggccaaggccactccactcatggacaagccatggctcgtgatgggattgtggtggacatggccagcctaagaaaacaaagaaatggggttgcgattagtgtctctaaggaccctttgatgggtcactatgctgatgttggaggggaacaactctggattgatgtgctacatgccacacttgaatatggacttgcaccagtttcttggactgattatttgtacttgaccgtgggagggacactttctaatgctggaatcagtggccagagcttccgttatggacctcaaatcagcaacgttcatgaaatggatgtcatcactggtatggagttagttgttttttttaatcaataaatgttaatattattagcttgttagttttttttgaaaaaattgaattaactttcgtttcctcttttctttctttttttaaccacacaattaatctaataactactggtattaagttagtttattttccatttttcatatataagttaggatttctaattaaaattgacatttcgtaccaccactacaaaaaaataatgtatcagtggcacaaaaaaatatattggcatcacttgtttttttagtcattaatattttgtagcatcacaaaaaatatggtgacaagttttctaaaaattacaaattaactgattcgtcagtgatgttaatgattttttagtgcgtcttggcaactaatgttttcatcttatataaaattagaaacaatagcggcaacagcacctgacattgtgtttgtgttttgcgtgtttctatcgcctaatttttgttgagaacgtgttcgtgaaacttggaaaaagagaaaattgaaattttcttgagatatctaccacttaagaaaaacaaatggctgtttccgttttgtctcttatgacatgacatggtacgtcatagatgaagttctgctaaatatatttgatatgatttcttgaacacgttttatatattcccacttcccagttagtgtggttgttgaatctaattaaaacaggaatagtctttgtctacaatatgggtgagcgatgcaaactttccaagggtttagaagttagaactatataggtccacggtcataattttatattcttgattaactttatgttggttaagtcgttcatatttggtcaattcattcatatgagaaaatactgaaatacaaacatggaaaaatgttaattactcttataattggcgcatgcatgcatctaaattatatgattttaataaatagtttttgtcatctacttgatttcaggaaaaggagagttcgtaacatgctcttcacagaagaacttggagttattccacgcggttcttggaggcttgggacaatttggagttatagcaagggcgagaattgctcttgagccagcacccaaaagggtacgtttatagagaattgactagaattttgtcttgtagcttttcctccaccaattcatatagtgacacctaatcgaattgtcatttttttttacggtgaattgtcattttgtaaatctaccaagtggtagttggcacccatatatgtatgaactatagtaccatacatttcattttatgttggtgtgttagtcatccatgatgaacacatacacaaatgaaaataggacgagttatacgtacgtaagggtttgaatcactgaatgtggatttttgaagttgaaagcatattaatcttggtttgaaaaagaaaaaaaaaatcggaagtccctcttgaagttatcatgactcttatattaagccaatagaattagaaaaactataattatgaatgatcatgttaattctttcagtgacttaaaatcttatctacaaaaagtacccttttgaaaaagaccttcacttaagtccatgcatacagtactaatcttacatacttgagagttgagacttgaagcatgaggagatttgaagtctggagaaacaagccaccacatattaattactaccgtattcttatctttatttatccttccaattttgatgggactggttgcacatacattcatacatactaacatacataaatacgtctctctctcatgtatttcattttattatattctatttcgttagtaagtttactagtataagacattattaatggtgaatttttgttggcatgcaggttaagtgggtcagactactttatagtgacttttctgcttttaccaaagaccaggaacgattaatctcaatcaatggaaggaaacaaaagaacgcattggattttctggaagggatgctgctaatgaaccaaggccccataaataattggagatcctctttcttccctctatctgaccatcccagaatagcttctttaataactgaacatagcatcctctactgtcttgaagtggctaaatattatgacgaacaaaccgagttaaatgtggacaaggtaacctcgtctagtcatatctattatatatagttagatcttgtcacatttctttgtttaaaaaataaaataaaaggcacaatcccaaaaagtcaaaagcaaatgcctagatattgtgtgttttcttggatattaattattacaccttaataacccataataatttttttatttttctttgtctctgtaggaaattgaagttttgctccaaggactagcctatatccctggatttaattatgagaaaaatgtctcgtacgttgagttcttgaatagggtccgaagtggagagttgaaacttcagtcacaaggactgtgggaagttcctcacccgtggcttaatttgtttataccaaaatctcaaatcttggattttaattcaggagtattcaaagatatagttcttaaaagaaacatctcctctggaccagtcttggtttatcccatgaatagaaacaagtaagccttgaatgcatgaatcacaatctagtgtcattataattcaggagtgtgtgatgcaatcttttaattttctgaccattcaactcaatatcaattttatttcttttttcaattaaaatgcaaaagagaataataattaataatatgaaatttaattccaggtgggacgataggatgtcagcatctataccagacgaggatgttttctacacagttgggtttttgcactcaagtgggtttgatacttggaaggcatatgatgctcaaaacagagaaattttggagttctgtagagatgctggcatcatggtcaagcaatatcttcccaaccacagcacacaagaagattggacaaaccattttggtgctaaatggatgaaattcttagaaagaaaacatcagtttgatccaagaatgattctatcacctgggcaaaaaatcttccacaaaaaattacagccagtgttttaaatattttccctaataaaaaaagtaaaaatgttttgtggtgggactacctcaattagatggctagctagggacaggtgtacatacagtgtgaccaagaccaagatggcttttgtatgctaaagtttgcattgctagctagagaaattaataaggtggggcattaaaggctgcatgagtacttttggcacctattatgctacatattaccttagatacgttaggttgacaaagtcgtactggtaggtacaagaagcacagttgtctctcacactgtctgtcacccaacttgctatatagtgtgtggagaaattcggatcatattgaagatgctgtgagttatagtcctccaatattaaatgtttaacgattctgtctttctcttatataattttgttttgcattatattactttcgcactggtgcaaacatatatatcaatgattataattaatttatacaatgacgagtataattgtacccaagttgcatgccataatatttgtcaaaaacaaaaagttgtatgccataatcaatccaggttgctagataataagatagatatgaatatgataacataaaatgctattaaagcaacaaataaacaataacacatagtccttatagggttcataattgatcgatgaacctagctagacgttgattttaggttaatttccagcgaggataaaatttattatataaagaaataactaaccaacacaaaataataaaaaattaaaaaaaaacgaagaaacttattttagagatataatttgttttagtatttgattgtaatttgagagattagctaggctctcaccaagtgagatctagagtatattcttaagaaaatatttataataaagaacccttaaacattttgcaaaacaaagggtggaattaatattaacaacaataattataatatcttgaaaattttatgaaaataatatatatatatatatatatatagagagagagagagagagagagagaaaattctcacaaacaatttttatctgttatttcaaattggtgtatgactccttagtccttagttcatttgtttgcacccagtcctgtcttaggtagttgattttatagttaggtaaattaatttctcgcactcttcgcttgattgtcatttatgggttgaactgttgaagtgattttatattttttaataaatttcacctgcaaaaaaactcaccattagcatacgccccccccccccccccccccccctctcccaaaaaaaaaaaaaaaacgaaagaagattaattagaaagaataaggtcgtgaaatgatgttacaaataaggcatatcagaatcagacgcaagggaagaataaaaacgttacaacaattcgcgcacaatgcaccccaaaaaaaaaatgacaggcacacataccttaaggaagaagaatcaacgctttca

SEQ ID NO: 118 - DNA, 5775 bp, Artificial Sequence
  Synthetic polynucleotide
atttagcatccctccctttgcacaatgtacaatttgggttttgaataatttttgtcacaccttcatttcgtgggactacttctctaatctatacccatcctggtgaaaaataaagggagcgagttacttacttaattaaacatacttaagtttctctctgactctctctcctctttttaattaatttatcataaacaaatatgtgtgcgagtattaaacccgtgcaaaatattagtattattgtttaattttttttccttctcatcaatcataaatatactttttaatacaaaataaaaaatagttaactcagaagatttcttcacttaatcacttcgattcaatattaaaaatcaatccacgctttgttgttttttttcccatgacttatcacgtacatttattatttattatttttctgatgttcttactataaagggaatcactatttgtcacacacaaaactataaagggaatcaaatgatcaattcttatttaaaaactctattaattaaaattacaattacaacaaaaccctaattttatcctccttataattaaacctccacattctctctctctctatcaatacatgtgtttctcaaattaaatattttccatatcctccttttatcatgcaaagtcctcttccattctatatatagcccctacctcctccacctcctttccccactacaacacacaccaacaatcaaatcaatccatccaacctagacatctctcatcttctccaaattaacaaaaatggtagctgggaaatacccttcccccacatcccagaggccctccaggggagggcctccagggactacgggaacctcgtccgcgaggttccctcggcggtcttccacccgacctcgtcgagcgacatcgcgaggctgatcaagctgtcgtacaacggttctgtccccttcaagatagcggcgagggggcaagggcactcgacgaggggccaggcgatggtacgtgatggggtggtggtggacatggccgggttcagagagagagggaatggagagggaataagggttgtgatgagtgttgttgtggaccctaataataagaatggttatggttactattatgctgatgttggaggggaacagttgtggatcgatgtgctaaacgccacgcttgagcatggacttgcacctatgtcctggactgattacttgtacttgacggtgggaggaactctctccaatgctggcatcagtggccagacattccgctatggtcctcaaatcaccactgtccgccaaatggacgtcatcactggtaagacaactttcaatttattcagttaattttatcatataattttaccaaatacttataaaccatatcagaaacttttaatttaatcaactaactcacaattagtttaatcatatacttttaatttaatccactaacttataaatttgtaacttttcagcttggaggtttgtaggttataagtctcaactttccactaacttataagttagttttagttttattgtatgtggtacttttgaaaattcaaggattttggtactataataactcgttcaactgttggcttagtatcaaaactcttggattttcaagtgtacttcaacaaccatcttaatttaattgatcagggttttaatattgtgaaaattggtcattggacaacttggaaagtgacacagcttggaaaagaaggaaagagggagatgggaagggaaaagaaagaaaataacttttaaaattagttgcgtgaaaaaattaaggttgctgaattaaattatggttcaccacgactctaattgtggcaacccaacgtgccgtggttgtggatattttcagaactttattgcaacttcggttatagtggcgtttgttcaattcattttttaatgtatcagactgtgattgcgattgaaattttataaaatctttttttttttaaacttgttcttttgattaggattaggaatttcagaaacttgattctatttcatatacttttttttaatgtaataccgaattagtggttgataaacgagtctttgtctacaaatttggtgaatgttagcaaccgctttccatctggtcccatgcttgaaaattttcttaaccatggaaattagttcacacggacagtcatagccttcaattcttgattaattgtttccttttctaaaatatggtgatactattatattattggtccaaggtcttgttttggtcaaatttttttattagaaataaacgggctgctgaattttaatttactcaagtgtttcttaaagaatatgtatgcatgcatgcaattatatattattattattatcattactgttatgtttaatcaagtttaatttggtttggttcaggaaagggagaatttgtgacttgctctcagcagacgaattcggagttgttccacgcggttctgggggcttaggacaatttggaattataacaagggcaagaatcgctcttgccccagctcccaagagggtacgtttaaaatcttcaagaattgactaggactttgtcttgttgcttcttcctccaacatctctcacatagtaacgccaatttctgcatatgttacattattaattcaaccatcaagctttagggaagcatcaaatgtccttgtcctaaatgctttatgtcatcatttttcttggcaccctttcgtttcacattgtgttagtgcatattagtcatccatgaaagacacatgaaaataaaatttgttggaaaaatataaatcatattttcataagtcttttgaaatatacagtaaccttagagaccttaagcaattaagccaataaaaagggtcgtattatcaaaccccaactaacaactattagaaaatactaacaagtataggtgcatacataaatatgtttccactagaaagtatataaagttggtgagatgattcattttgaattttagtaccttaattatttaactttatccttctatttgatgggactcatcgcataagccatacatatatacataatcatgcgttcattattgtttttcattatgagttaatgagttgattgtatgaactaatggtgaatttctcattggcaggttaaatgggtgagacttttgtacaatgacttttctgctttcaccaaagaccaggaacaactaatctcaatcactagaaggaaacaaaatattgcactggattatttggaaggattgctgctaatgcaccaaggacccataaataattggagatcttctttcttccctttagccgaccatgcccgaataatttcgctagtaactaaacacagcgtcctctattgcctagaagttgccaaatattatgatggccaaaatgaaaacaatgtggacaaggtaccgtctccattcatgtgcatttgccttcatgatgtgtcttttatttcttttcttttaattttttgtctcaccttatataataaccctttgtcacactcaatattattatatttttaaagagtttaatggttatacactatttttactttatttaattataaattatcattgatatattttttaagataattatcataaaagttaataaatttatcagttataattgaatgattgtataaaattatttaatttatattgcataatttattttctatttgtaatctttttttactataagttgttatattgtaagtaattaatattctcattttcatgattgtgtaggaactcaaagttttactacaaggactgagctatatccctggattttactatgaaaaagatgtctcgtatgttgagttcttgaatagagttcgaagtggagagttgaagctacaatcacaaggactatgggatgttcctcacccatggcttaatttgtttataccgaaatctcaaatcatggaatttgactcgggcgtgttcaagaatatcatccttaaacgaaacattaccacaggacccgtcttggtttaccccatgaatagaaacaagtaattgagcttaactaactaatctcaatttgtattgttatcattaggaaaaatgttaattggtacgaaaactatatactacactattttcattaaaattcatgaaagtgaaatttctctttcctaaaataacttctttctcttaaaatgaatttttgtttttctcaatctccatcaattacttatttccttttttgaacgtttgaaaagtcattcataacttttttttcataaaaaggtcatttcgtaccaattaaatagcattgcctttattatcatatgtacacaattcttctcttcactcacttctctctttttttttcccattaaaattgtaaaacaaataatcaggtgggacaataggatgtcagcatcaatacccgacgaggatatcttctacacagttggatttttgcattcaagtgggtttgataattggaaggcctatgatgctcaaaataaagaaattctacaattttgtaacgattctgggatcaaggttaagcaatatcttccccactaccgcacacaagaagattggacaaaccattttggccctaaatggaggacttttgtagaaagaaaacaccagtttgatccaaaaatgattctatcacctggacaaagaatctttaacaattaaactagctttaaaaaatatatataatatggtgggactacccaagttagctagctggctgatctcaagtgtacacataggacccagaattcagatgatagcctttgtacttgtttttgttaagagggtggggttaaaagctgcatgactttggcatatatgtagatcaggttacacatactttagatacgttaggttgacaaaatcatgtgtgaaagatgcacacagctagctgtgtacctttctttctctctctctctttctttctctctgtccctcaatttgtctatcactaaaaagattactatagtttagaacctagtgaagatggaaaaaaatcattatatagaggatttaattttatcacacgttctaatcatatacattaatattcttaaatgtgcaatgagtgtgttcggtgccttaatgattctttatctttgttaattgttagtatattatagggttttgtttttcccttcctaattttgtaacggccatccctactagcaataattgagatcctaggttaactaaggaagagcattattgtgtccaaattgagagtcctagctgtatgccataataataaatcatcgtaagttgctagatagatgtgataacgccaaatgccttcaaatactattattaatctccatcgcgagatccttcgttgtgattatgtagaaaagattacgctgcttttacaagagaatactccaagaaagcaagtgattgctccttaatataagaatcatacaataaacaaatggtgttgtagtccataaagtgtatttaatatttgatgaaagagtgtgtagacatcaaagtgataaaactaataaatttaagtttgatgcaattcgaagtcgtagatacttaattaatctctaaatcatattagttttaaaccatacagattttaatatgttgaatggattaatctttaattgtgcattggaaaatattataattcataaaaaaagaaataaagtttagacatgaataattacggactaatgaatgcaacctatatatactacgtctctcaattttgcggagaatttaggaatattatagtatttcactgaaaggacacacaagtggcaatgatgaatattttaattt

SEQ ID NO: 119 - DNA, 5755 bp, Artificial Sequence
  Synthetic polynucleotide
ataaatggtagaaatctgtgggttcaaatgttcaattgctggggatcttcgtgatcatgatgattcatacacaatctctagaaacacgtacgcaaatattaattaatcaatttcctttttatagtctcctcacaattcacatgaaacttcatactctattatccgattccatttccatcgtatctttgaatttgacatttgtttgcccaacatgtaattaactttcccttctcatcttaaagatgtaacatgatatatattataacttgtaattaacccaatatttttaactctctatttttacactcatctgacatgtatttttatttttcatttttttttcttatcacatcacctcttacgtgtacaatttttctctttttcttatttctgtcttccataatagtaattaatattcatcggtccgatatgtatacagcccaaaaaagtgtgtaaaatcatttttgtatttctaaccctctctttctcatgcaagctagcttcttctttctatttatagcccttctcccttcacccaccaacacaccacaactccaaactttttcctcttgttctcttcttcttcaacacaactagtcataatccagctcatctctctctccctctctctttgttctctctttctctttctccaaaatggctctaaactacccttttttaacctacttcatactactgctagtaaccaattcactgtgggaaaaactgagcaatggaaagctccgattctaccagagcttgacattgataacatatcccacaaactccatgatgaccctgaaaccattcaaatggcttcaagggactatggccatttaacgcatgaattcccattagctgtgtttcgtccatcttctatagatgacatagtcaccttgataaaatcttcgtacaatagctttgccccttttgacatagctgcgaggggccaaggccactccactcatggacaagccatggctcgtgatgggattgtggtggacatggccagcctaagaaaacaaagaaatggggttgcgattagtgtctctaaggaccctttgatgggtcactatgctgatgttggaggggaacaactctggattgatgtgctacatgccacacttgaatatggacttgcaccagtttcttggactgattatttgtacttgaccgtgggagggacactttctaatgctggaatcagtggccagagcttccgttatggacctcaaatcagcaacgttcatgaaatggatgtcatcactggtatggagttagttgttttttttaatcaataaatgttaatattattagcttgttagttttttttgaaaaaattgaattaactttcgtttcctcttttctttctttttttaaccacacaattaatctaataactactggtattaagttagtttattttccatttttcatatataagttaggatttctaattaaaattgacatttcgtaccaccactacaaaaaaataatgtatcagtggcacaaaaaaatatattggcatcacttgtttttttagtcattaatattttgtagcatcacaaaaaatatggtgacaagttttctaaaaattacaaattaactgattcgtcagtgatgttaatgattttttagtgcgtcttggcaactaatgttttcatcttatataaaattagaaacaatagcggcaacagcacctgacattgtgtttgtgttttgcgtgtttctatcgcctaatttttgttgagaacgtgttcgtgaaacttggaaaaagagaaaattgaaattttcttgagatatctaccacttaagaaaaacaaatggctgtttccgttttgtctcttatgacatgacatggtacgtcatagatgaagttctgctaaatatatttgatatgatttcttgaacacgttttatatattcccacttcccagttagtgtggttgttgaatctaattaaaacaggaatagtctttgtctacaatatgggtgagcgatgcaaactttccaagggtttagaagttagaactatataggtccacggtcataattttatattcttgattaactttatgttggttaagtcgttcatatttggtcaattcattcatatgagaaaatactgaaatacaaacatggaaaaatgttaattactcttataattggcgcatgcatgcatctaaattatatgattttaataaatagtttttgtcatctacttgatttcaggaaaaggagagttcgtaacatgctcttcacagaagaacttggagttattccacgcggttcttggaggcttgggacaatttggagttatagcaagggcgagaattgctcttgagccagcacccaaaagggtacgtttatagagaattgactagaattttgtcttgtagcttttcctccaccaattcatatagtgacacctaatcgaattgtcatttttttttacggtgaattgtcattttgtaaatctaccaagtggtagttggcacccatatatgtatgaactatagtaccatacatttcattttatgttggtgtgttagtcatccatgatgaacacatacacaaatgaaaataggacgagttatacgtacgtaagggtttgaatcactgaatgtggatttttgaagttgaaagcatattaatcttggtttgaaaaagaaaaaaaaaatcggaagtccctcttgaagttatcatgactcttatattaagccaatagaattagaaaaactataattatgaatgatcatgttaattctttcagtgacttaaaatcttatctacaaaaagtacccttttgaaaaagaccttcacttaagtccatgcatacagtactaatcttacatacttgagagttgagacttgaagcatgaggagatttgaagtctggagaaacaagccaccacatattaattactaccgtattcttatctttatttatccttccaattttgatgggactggttgcacatacattcatacatactaacatacataaatacgtctctctctcatgtatttcattttattatattctatttcgttagtaagtttactagtataagacattattaatggtgaatttttgttggcatgcaggttaagtgggtcagactactttatagtgacttttctgcttttaccaaagaccaggaacgattaatctcaatcaatggaaggaaacaaaagaacgcattggattttctggaagggatgctgctaatgaaccaaggccccataaataattggagatcctctttcttccctctatctgaccatcccagaatagcttctttaataactgaacatagcatcctctactgtcttgaagtggctaaatattatgacgaacaaaccgagttaaatgtggacaaggtaacctcgtctagtcatatctattatatatagttagatcttgtcacatttctttgtttaaaaaataaaataaaaggcacaatcccaaaaagtcaaaagcaaatgcctagatattgtgtgttttcttggatattaattattacaccttaataacccataataatttttttatttttctttgtctctgtaggaaattgaagttttgctccaaggactagcctatatccctggatttaattatgagaaaaatgtctcgtacgttgagttcttgaatagggtccgaagtggagagttgaaacttcagtcacaaggactgtgggaagttcctcacccgtggcttaatttgtttataccaaaatctcaaatcttggattttaattcaggagtattcaaagatatagttcttaaaagaaacatctcctctggaccagtcttggtttatcccatgaatagaaacaagtaagccttgaatgcatgaatcacaatctagtgtcattataattcaggagtgtgtgatgcaatcttttaattttctgaccattcaactcaatatcaattttatttcttttttcaattaaaatgcaaaagagaataataattaataatatgaaatttaattccaggtgggacgataggatgtcagcatctataccagacgaggatgttttctacacagttgggtttttgcactcaagtgggtttgatacttggaaggcatatgatgctcaaaacagagaaattttggagttctgtagagatgctggcatcatggtcaagcaatatcttcccaaccacagcacacaagaagattggacaaaccattttggtgctaaatggatgaaattcttagaaagaaaacatcagtttgatccaagaatgattctatcacctgggcaaaaaatcttccacaaaaaattacagccagtgttttaaatattttccctaataaaaaaagtaaaaatgttttgtggtgggactacctcaattagatggctagctagggacaggtgtacatacagtgtgaccaagaccaagatggcttttgtatgctaaagtttgcattgctagctagagaaattaataaggtggggcattaaaggctgcatgagtacttttggcacctattatgctacatattaccttagatacgttaggttgacaaagtcgtactggtaggtacaagaagcacagttgtctctcacactgtctgtcacccaacttgctatatagtgtgtggagaaattcggatcatattgaagatgctgtgagttatagtcctccaatattaaatgtttaacgattctgtctttctcttatataattttgttttgcattatattactttcgcactggtgcaaacatatatatcaatgattataattaatttatacaatgacgagtataattgtacccaagttgcatgccataatatttgtcaaaaacaaaaagttgtatgccataatcaatccaggttgctagataataagatagatatgaatatgataacataaaatgctattaaagcaacaaataaacaataacacatagtccttatagggttcataattgatcgatgaacctagctagacgttgattttaggttaatttccagcgaggataaaatttattatataaagaaataactaaccaacacaaaataataaaaaattaaaaaaaaacgaagaaacttattttagagatataatttgttttagtatttgattgtaatttgagagattagctaggctctcaccaagtgagatctagagtatattcttaagaaaatatttataataaagaacccttaaacattttgcaaaacaaagggtggaattaatattaacaacaataattataatatcttgaaaattttatgaaaataatatatatatatatatatatatagagagagagagagagagagagagaaaattctcacaaacaatttttatctgttatttcaaattggtgtatgactccttagtccttagttcatttgtttgcacccagtcctgtcttaggtagttgattttatagttaggtaaattaatttctcgcactcttcgcttgattgtcatttatgggttgaactgttgaagtgattttatattttttaataaatttcacctgcaaaaaaactcaccattagcatacgccccccccccccccccccccccctctcccaaaaaaaaaaaaaaaacgaaagaagattaattagaaagaataaggtcgtgaaatgatgttacaaataaggcatatcagaatcagacgcaagggaagaataaaaacgttacaacaattcgcgcacaatgcaccccaaaaaaaaaatgacaggcacacataccttaaggaagaagaatcaacgctttca

SEQ ID NO: 120 - DNA, 5760 bp, Artificial Sequence
  Synthetic polynucleotide
ataaatggtagaaatctgtgggttcaaatgttcaattgctggggatcttcgtgatcatgatgattcatacacaatctctagaaacacgtacgcaaatattaattaatcaatttcctttttatagtctcctcacaattcacatgaaacttcatactctattatccgattccatttccatcgtatctttgaatttgacatttgtttgcccaacatgtaattaactttcccttctcatcttaaagatgtaacatgatatatattataacttgtaattaacccaatatttttaactctctatttttacactcatctgacatgtatttttatttttcatttttttttcttatcacatcacctcttacgtgtacaatttttctctttttcttatttctgtcttccataatagtaattaatattcatcggtccgatatgtatacagcccaaaaaagtgtgtaaaatcatttttgtatttctaaccctctctttctcatgcaagctagcttcttctttctatttatagcccttctcccttcacccaccaacacaccacaactccaaactttttcctcttgttctcttcttcttcaacacaactagtcataatccagctcatctctctctccctctctctttgttctctctttctctttctccaaaatggctctaaactacccttttttaacctacttcatactactgctagtaaccattgatattcactgtgggaaaaactgagcaatggaaagctccgattctaccagagcttgacattgataacatatcccacaaactccatgatgaccctgaaaccattcaaatggcttcaagggactatggccatttaacgcatgaattcccattagctgtgtttcgtccatcttctatagatgacatagtcaccttgataaaatcttcgtacaatagctttgccccttttgacatagctgcgaggggccaaggccactccactcatggacaagccatggctcgtgatgggattgtggtggacatggccagcctaagaaaacaaagaaatggggttgcgattagtgtctctaaggaccctttgatgggtcactatgctgatgttggaggggaacaactctggattgatgtgctacatgccacacttgaatatggacttgcaccagtttcttggactgattatttgtacttgaccgtgggagggacactttctaatgctggaatcagtggccagagcttccgttatggacctcaaatcagcaacgttcatgaaatggatgtcatcactggtatggagttagttgttttttttaatcaataaatgttaatattattagcttgttagttttttttgaaaaaattgaattaactttcgtttcctcttttctttctttttttaaccacacaattaatctaataactactggtattaagttagtttattttccatttttcatatataagttaggatttctaattaaaattgacatttcgtaccaccactacaaaaaaataatgtatcagtggcacaaaaaaatatattggcatcacttgtttttttagtcattaatattttgtagcatcacaaaaaatatggtgacaagttttctaaaaattacaaattaactgattcgtcagtgatgttaatgattttttagtgcgtcttggcaactaatgttttcatcttatataaaattagaaacaatagcggcaacagcacctgacattgtgtttgtgttttgcgtgtttctatcgcctaatttttgttgagaacgtgttcgtgaaacttggaaaaagagaaaattgaaattttcttgagatatctaccacttaagaaaaacaaatggctgtttccgttttgtctcttatgacatgacatggtacgtcatagatgaagttctgctaaatatatttgatatgatttcttgaacacgttttatatattcccacttcccagttagtgtggttgttgaatctaattaaaacaggaatagtctttgtctacaatatgggtgagcgatgcaaactttccaagggtttagaagttagaactatataggtccacggtcataattttatattcttgattaactttatgttggttaagtcgttcatatttggtcaattcattcatatgagaaaatactgaaatacaaacatggaaaaatgttaattactcttataattggcgcatgcatgcatctaaattatatgattttaataaatagtttttgtcatctacttgatttcaggaaaaggagagttcgtaacatgctcttcacagaagaacttggagttattccacgcggttcttggaggcttgggacaatttggagttatagcaagggcgagaattgctcttgagccagcacccaaaagggtacgtttatagagaattgactagaattttgtcttgtagcttttcctccaccaattcatatagtgacacctaatcgaattgtcatttttttttacggtgaattgtcattttgtaaatctaccaagtggtagttggcacccatatatgtatgaactatagtaccatacatttcattttatgttggtgtgttagtcatccatgatgaacacatacacaaatgaaaataggacgagttatacgtacgtaagggtttgaatcactgaatgtggatttttgaagttgaaagcatattaatcttggtttgaaaaagaaaaaaaaaatcggaagtccctcttgaagttatcatgactcttatattaagccaatagaattagaaaaactataattatgaatgatcatgttaattctttcagtgacttaaaatcttatctacaaaaagtacccttttgaaaaagaccttcacttaagtccatgcatacagtactaatcttacatacttgagagttgagacttgaagcatgaggagatttgaagtctggagaaacaagccaccacatattaattactaccgtattcttatctttatttatccttccaattttgatgggactggttgcacatacattcatacatactaacatacataaatacgtctctctctcatgtatttcattttattatattctatttcgttagtaagtttactagtataagacattattaatggtgaatttttgttggcatgcaggttaagtgggtcagactactttatagtgacttttctgcttttaccaaagaccaggaacgattaatctcaatcaatggaaggaaacaaaagaacgcattggattttctggaagggatgctgctaatgaaccaaggccccataaataattggagatcctctttcttccctctatctgaccatcccagaatagcttctttaataactgaacatagcatcctctactgtcttgaagtggctaaatattatgacgaacaaaccgagttaaatgtggacaaggtaacctcgtctagtcatatctattatatatagttagatcttgtcacatttctttgtttaaaaaataaaataaaaggcacaatcccaaaaagtcaaaagcaaatgcctagatattgtgtgttttcttggatattaattattacaccttaataacccataataatttttttatttttctttgtctctgtaggaaattgaagttttgctccaaggactagcctatatccctggatttaattatgagaaaaatgtctcgtacgttgagttcttgaatagggtccgaagtggagagttgaaacttcagtcacaaggactgtgggaagttcctcacccgtggcttaatttgtttataccaaaatctcaaatcttggattttaattcaggagtattcaaagatatagttcttaaaagaaacatctcctctggaccagtcttggtttatcccatgaatagaaacaagtaagccttgaatgcatgaatcacaatctagtgtcattataattcaggagtgtgtgatgcaatcttttaattttctgaccattcaactcaatatcaattttatttcttttttcaattaaaatgcaaaagagaataataattaataatatgaaatttaattccaggtgggacgataggatgtcagcatctataccagacgaggatgttttctacacagttgggtttttgcactcaagtgggtttgatacttggaaggcatatgatgctcaaaacagagaaattttggagttctgtagagatgctggcatcatggtcaagcaatatcttcccaaccacagcacacaagaagattggacaaaccattttggtgctaaatggatgaaattcttagaaagaaaacatcagtttgatccaagaatgattctatcacctgggcaaaaaatcttccacaaaaaattacagccagtgttttaaatattttccctaataaaaaaagtaaaaatgttttgtggtgggactacctcaattagatggctagctagggacaggtgtacatacagtgtgaccaagaccaagatggcttttgtatgctaaagtttgcattgctagctagagaaattaataaggtggggcattaaaggctgcatgagtacttttggcacctattatgctacatattaccttagatacgttaggttgacaaagtcgtactggtaggtacaagaagcacagttgtctctcacactgtctgtcacccaacttgctatatagtgtgtggagaaattcggatcatattgaagatgctgtgagttatagtcctccaatattaaatgtttaacgattctgtctttctcttatataattttgttttgcattatattactttcgcactggtgcaaacatatatatcaatgattataattaatttatacaatgacgagtataattgtacccaagttgcatgccataatatttgtcaaaaacaaaaagttgtatgccataatcaatccaggttgctagataataagatagatatgaatatgataacataaaatgctattaaagcaacaaataaacaataacacatagtccttatagggttcataattgatcgatgaacctagctagacgttgattttaggttaatttccagcgaggataaaatttattatataaagaaataactaaccaacacaaaataataaaaaattaaaaaaaaacgaagaaacttattttagagatataatttgttttagtatttgattgtaatttgagagattagctaggctctcaccaagtgagatctagagtatattcttaagaaaatatttataataaagaacccttaaacattttgcaaaacaaagggtggaattaatattaacaacaataattataatatcttgaaaattttatgaaaataatatatatatatatatatatatagagagagagagagagagagagagaaaattctcacaaacaatttttatctgttatttcaaattggtgtatgactccttagtccttagttcatttgtttgcacccagtcctgtcttaggtagttgattttatagttaggtaaattaatttctcgcactcttcgcttgattgtcatttatgggttgaactgttgaagtgattttatattttttaataaatttcacctgcaaaaaaactcaccattagcatacgccccccccccccccccccccccctctcccaaaaaaaaaaaaaaaacgaaagaagattaattagaaagaataaggtcgtgaaatgatgttacaaataaggcatatcagaatcagacgcaagggaagaataaaaacgttacaacaattcgcgcacaatgcaccccaaaaaaaaaatgacaggcacacataccttaaggaagaagaatcaacgctttca

SEQ ID NO: 121 - DNA, 7386 bp, Artificial Sequence
  Synthetic polynucleotide
ttaaatcggttcaaaattgttgaatcgatccaaaactagtaaatacagtaggttaattgatttcacttgaaatttaaaaaaaaaaaattaaaatgacgtcattttagtttttttttaaattattataacttatatgacatttttaagtgaagtttactttttattattattaatttatgcatactaggtttctgaaatattatattaaaatattatatatatatatatatatatatatatatatatatatatatatatatatatatatatatatatattattaaaatcaattccacttcgattgagctattaacttttgaaccaatatcttccccagttcaatgaccatccaagtctgaaaacattggttaccatcaacgttacccttccgtgaattggaaaagttaatgcaatataggttgatccaaggataagtcctatggtcccagaaagaaaatcttgagagatccttttgataattacccgagtttttactctctccttttaattcacgaaattggaaacttcaattgctaatataaaaagaattttgttagccaatatcatcagggtattgtcaaagaattacaagaaaaaaaaattataagataacataaaaaaataaaaaacaacataattttatatattttaataaaaaattcttttaatttttttttatcaatattctatagttactggcatttgacatgtaaaaatgtaaacatatgaattgataaaatttgaccaatgtttgaccctgagataggaatccaacggccccagttcaattgcaatcttttatttttactacgtgaaggcccaacaatggagaaccttgtggattttattgctgagaatctgtggttacgatgatgacacaccaacacaatcacagaaagcaagtaccgtttggaaggcctaacacttcattaattgcttcattaaatttattttactttctagctgctcaatttaattgctttacacaaatacttcatgacgtttcagaaggagggccaaatacaatctctacaatggttccatcgtatctttgaatttgacatttagcatccctccctttgcacaatgtacaatttgcattttgaatatttttttctcaccttcatatcgtgggactacttctataaccatcctggtgaaaataaataaagcgagggaattacgtaattaaacatatttaaatttctctctcctctgtttaattaatttatcaaaaacaaatatgtgtgcgagtatttaaaaatgtgtaaagtattattattttttaatttttcttttttccttctcatcaatgataaatatactttttaatataaaaatcaaacaataactataaaaaaaacatcttcacttcaattcaacattaaataaaaaataatccctgctttgttattttttacccaccaattatcatatttgttatttattatttttttatgttcttgctataaaggaaatcactatttgactcacacaaaactataaaggaatcaaataatcaattattatttaaaaactctattaaaataacaattacaacaaaatcccttatttttttcttccttatcattattaaaccttcccattctctctttctatctctacatgtttttctcaaattaaatattttctatatcctcctttatcatgcaaattaaagtcctcttccattctatatatagccgctacctcctccacctcctttccccactacaacacacaaacaccaacaaccaaatcaatccatccaccctagaaacaacaaagcactctctcttctctcattctattatcttctctcatcctcttattctctccaaaccaacaaaaaaaaaatggttgctgagaactacccttctcccacatacttcatcataaccataacacgtttgatctccacagtgggcaaaacctcccaatggacgaaggccctgtcgctgcctccggaactcgcctccgtctccctcgacgacaccatcttctgcaagctccgtgacgacccagaggccagggaagggcctccagggactacgggaacctcgtccgcgaggttcccttggcagtcttccacccagcctcagcgagcgacatcgcgaggctgatcaagctgtcgtacaacggctctgtccccttcaagattgcggcgagggggcaagggcactcgacaaggggccaggcgatggcacgtgagggggtggtggtggacatggcggggttcagagagagagggaatggagtggggataagggttgtgagtagtgtggaccctaataataagaatggttactactattatgcggatgttggaggggaacagttgtggatcgatgtgctacacgccacgctcgagcatggacttgcacctatgtcctggactgattacttgtacttgacgctgggagggactctctccaatgctggcatcagtggccagacattccgctatggtcctcaaatcaccactgtccgggaaatggacgtaatcaccggtaagaaaactttccattcaaccagttaacttacatgtttttagttttttagcttccaatatccaatagtttataacttgtaagcttcaattttatgttaatttataagctagttttaccctacttttgaaaattcaaggattttggtactacaataactcccttgtcaaactcgttcaattgttggcttagtatcaagtagactcttggatttttaggtgtactttaacaaccatgttaatttaattgatcagggttttaatattatggaaattggccattggacaacttggaatggaaggaaagcgggagatggaaagggaaaagaaattaattagaataattgttaatattagttgcgtgaaaaaaattaaatttgctgaattaaattatggttcatcacgactctatttgtggcaacaccaacgtgccgttttcagaacttcattgcaacagcggttatagtggcgtttattcaattcatattttaatgcatcagactgtgattgcgattgaaattttatgaaatcttgttttataaacttgttcttttgattaggaaacttgattctattttatatatatttaatgtaacgccgaattaatggttgataaacgagtctttgtctaaaattttggcgaatgttagcaagcgttttccacgtggtcccgtacgtgtttgaaaaattcttaatcatggaatcagttcacacgggcagtcatagactcatagactccaattcttgattaattgttttcttattaatattggtccatggtcttattttggtcaattctttttattaaaaataaacgggctgctgaattttaatttactcaagtgtttgttaatgaatatgtgtgcatgcatgcaattatatatatatatatatattactattatttatttgtgttttaatcaaattttggtttggttcaggaaagggagaatttgtgacttgctctcagcagacgaattcggagttgtttcacgcggttcttggaggcttaggacaatttggaattataacaagggcaagaattgctcttgcgccagctccgaagagggtacgtttaaaatcttcggaattgactaggacttgtcttgttgcttcttcctccaacatctctcatatagtaacgcaaatttctaaatatgttacattattaattcaaccaccaagctttgcggaagcatcaaatgtcgttgtcctgaaagcttcatgtcatcatttttcttggcacccatatacacacacatacgtttcacattgtgtcagtgcatattagtcatccatgaaagacacatgtacaaatgaaaacgagaggagttatattaaaatgtgtgttggaaaaatatatatcatattttcataagtcttaattttgaaattaatatacagtaaccctttgagaccttagcaattaagccaataaaaaggctcgtattaaccccaaccaacaactattagaaaatactaacaagtataggtgtatacataaatgattcatttgaattttagtaccttaattatttaactttatccttctatttgacgggactcgttgcataagccatacatacataatcatgcgttcattattgtttttcattatgagttaatgagttgattgtatgaactaatggtgaatttttgttggcaggttaaatgggtgagacttttgtacaatgacttttctgcttttaccaaagaccaggaacaactaatatctatcactggaaggaaacaaaatgtttcactggattatttggaaggattgctgctaatgcaccaaggacccataaataattggagatcttctttcttccctttagccgaccatgcccgaataatttcgctagtaactaaacacagcgtcctctattgcctagaagttgccaaatattatgatggccaaaatgaaaacaatgtggacaaggtaccatctccattcatgtgcatttgccttgatgatgtttcttctattttttcttttaatgttttgatctcaccttatataataaccctttatcacactcaatcttgttatatttttaagagtttaatgataatattatgattttgttgtgaaaaaagagagtttaattgttattatataatcacaaattatcattaatatgacttttaaaataattaataatataaaaattaataaatttatcgtatttaatgagttataattaaatgatcatataaaattattttatattattaacatatagtttttttttctatttttaatatttgttttactataagttgttatattttcaatcttttttctagtataagttttaataatcaatattgtaagtaatattctcatttttcatgttgtgtaggaactccaagttttactacaaggattgagctatatccctggattttactatgaaaaagatgtctcatattttgagttcttgaatagagtccgaagtggagagttgaagctacagtcacaaggactatgggatgttcctcacccgtggcttaatttgtttataccgaaatctcaaatcatggaatttgactcgggcgtgttcaagaatatcatccttaaacgaaacatcaccacaggacctgtcttggtttaccccatgaatagaaacaagtaattgagcttaactaactaatctcaacttatgttgttatcattaggaaaaatgttaattggtacgaaaactatatataccactattttcatttaaattcatgaaagtgaaatttctctttcctaaaacaaattctttctcttaaaatgaatttttgtttttctcaatctccatcaattacttatttccttttttgaatgtttgaaaagtcattcacaacattttcttcataaaagggttattcgtaccaatttaaatagaattgccgttattatcagatgtacaattcttctcttcactcacttcttttccattaaaattgtaaaaaaaaaataaaaaaatcaggtgggacaataggatgtcagcatcaatacccgatgaggatatcttctacacagttggatttttgcattcaagtgggtttgataattggaaggcctatgatgctcaaaataaagaaattctacaattttgtaacgttgctgggatcaaggttaagcaatatcttccccactatcgcacacaagaagattgggcaaaccattttggccctaaatggaggacttttgtagaaagaaaacaccagtttgatccaagaatgattctatcacctggacaaagaatctttaacaattaaaatagctttaaaaatatatattcccccccccccccccccccccaaaaaaaaaaaaattatataatatggtgggactacccaagttagctagctggctgatcacaagtgtgcacataggacccagaattcagatgatagcctttgtacttgtttttgttaagagggtggggttaaaagctgcatgactttggcatatatgtagatcaggttacacatactttagatacgttaggttgacaaaatcatgtgtgaaataagatgcacacagctagctgtgtacctttctttctctctgtccctcaatttgtctatcactaaaaagatttctatatagtttagaacctagtgaagagaaagaaaaaaccattatattgaggatttaattttatcacgttctaatcctatacattaatattcttaaatgtgcaatgagtgtgctcggtgccttaatgattctttatctttgttaattgttatattgtagggttttgtttttgccttcctaattttgtaacaggggcacccctagcaataattgagatcctaggttaactaaggaacagcattattgtgtctaaattgagattcctagctgtatgccataataataaatcatcgtaggttgctagatagatgtgatagcgccaaatgccttccaatactataatctccattgcaagatccttcgttgtgattgtgtagaaaagattacgctgctttacaagagaatactccaagaaagcaagtgattgctccttaatataaagaatcatgcaataaacaaatggtgtcgtaatccataaagtgtatttaatatttgatgaaagagtagtgtagacatcaaacaaaataaagtttgatgcaattcgaattatagatacttgattaatctctaaattatgttgagacaatcatatttgaatttgataagactattatgaacgataaaaaatattataaataataaaaaaatttcatcaaacatttaatacaattatataccttactcaaatttgaaaacctgtacatataggaaaaaaacctttactaaaagaggttaaactcaccatacggatttttatatgtcgaagggatctttaattgtccatcggaaaacatcctaattcataaaaaaggaaagaaagtttagacatgaataattacggaccaatgaatgcaacctacgtctctcaattttaaggagaatttaggaatattatagtatatcactgaaagtacacacaagtggcaatgatgaatattttaatttaaagttttaattggattcgaaattaatcccttcttttttccagaaaaaataataatcatcgagtaatcaagacaatttcccaagtagacaacaagaatacaaaagagaatacgtgacttcgtttcaccatagaaaagaaggaatgcaataacgatgataataattataaaatgaaattgacaaaatatctaaatgcctgtagatatttctacagcgaatgataagtgtttttccattaaaaataagtttcttttgttaagaatttctaacatttttagttccaaaatataggaatgaagccaataagtaagtaagaatttctaacgtctgaaag

SEQ ID NO: 122 - DNA, 3657 bp, Artificial Sequence
  Synthetic polynucleotide
cttctcatccaatctaatagcaggatacgcgatgtttacattccgacaatagtggactcagtaccaacaccataaaaaaaaataaacaactagttatgtgtccataggggcaaaagaaaaagaaatacgcactactgtggaaagaagaaaaaaagcaataaggacttatttctatatccggaaaaagcatatatccttaaattggttaatgaacaaaaacttgaaacatgtctttccttcatgtttttgttgtaacttataacataacatgtaattgtttgtggttaccactgtttggaaaaagttgaagatttgtgagatctctcattgatgttacttttcctcttcaacttggcttctgtgtcactgtacatgtgatgcctttggcgtctctcttccttccaagtaagcagtccacatacgcattctcctcgtatcgtatgtcataagtcatgactgatcaacaatgctacgttgaccaagccaccacccacaaactcctttaaattctggcccaaacccttaagttcctgcattctccaatccatcactttctccttttcctcgtgttcacaaaatcacgctgcttaattattccttcaactaccatcatatcataccttctcaacagaaaaataaaaataaaaatgagatacatccttggagaacacaacattctgttcctcaaaagcttcgccttcacgatattattccttagttgcatagccattcggcttaacttgtgtctttccagcatcccttcttcactgaaatcaattcccctgggcatttaaaatttgatcaagttagcctaagccatgcagcaagggactttggcaacaggtaccaatataatccaatggcagtgctgcaaccagaatcagtttctgatattgtagccaccataaggcatatctggctgatgggtcctggctcccacctcaccattgcagcgaggggccacggccactcgctgcagggtcaggctcaagcccatggaggacttgtgatcaacatggaatcactcaaggtcccagaaatgcaggtatatcgctaaatattaattgttaatcgttaattttttgttagctaggcaatcaaatccacaatcttttcctctcttccttcttcttatacaaccaaactaaccttataactccaatgcagatacatgttgatgagggaaacaagtctcctccatacgtggatgtctcaggtggcgagttgtggataaacatattgcatgagactctaagatacggcttggcgccaagatcgtggacagactacctgcatctcacagttggtggcactctctccaacgctggtgtcagtggtcagacatttaggcatggtccccagataagtaatgtacagcagctcgagattgttacaggtttgtgaaaaagagaatgaataataattgtttgtcttttctgaataataattcatttgatactggctgcatataagttttctaataaataatttttttcccctactttgatgagtaaaacatggtcaatgaatggatgcaggaacaggggaggtgttgaactgttccgcggagaataatggggatctctttcatggtgttctagggggcttggccaatttggcattataacccgggcaagaattgtcctagaaccagcacctaccatggtaatgcatcactcatcagtgactataccaaaacaagcttctttttttttggttttaatgtgtgctttgggtcatgactgaaaattttctatttattggaacaggtaaaatggattagagtgctgtactcagatttcacagcattcacaagagaccaagagaggttaatatctgcagaaaagacttttgactacattgaaggatttgtgataataaacagaactggtcttctaaataactggcgattatccttcaacccacgagacccggtccaagctagtcatttcaagtcggatggaagaactctcttctgccttgaaatggccaaatacttaaacgtggaagaaatcgatgcagcaaatcaggtgaggccagcaacactcaatctaatagatttttttgaaaataaagggataattaactccaaggttttaaaatatgagaccgtgggttgcaacatcaaagttttctaactctttgcgacccgaattgagactatgtcgatagcatttgtctatgatttgcccgtgatatcaacaaacacgaccaaaccacatgcgactgcgacctatatttaaaaccttgattaactcattagtgataatctttctttaggaaagaaaataaaagaggctaaatcaaccgtatctcacttttgtgtgtgcaggaagttgaggaacatttgtcccgtttaagctacatcccatcaactcttttttcaacagaagtcacatttgtagatttcttagacagggtgcacatatccgaggtcaagttgcgttcaaaaggcttgtgggatgttccacatccatggctcaatcttctaatacccaaaagccaaatactcaactttgcacaagtcgtcttcgggaacatcctatcagaaactagcaacggccccgtccttatctacccagtaaacaaatcaaagtaatgaatggttcagaaaaaaacatactattaactctagaaacaaatattttagccgtcaatattttttaattgacatgttttgttttgtttgcaggtgggacaacagaacttctgttgtgattccagaggaagatattttctacttagtggcatttcttacatctgcagttccatcttcaaatggaactgatggcctagaacacatactaagtcagaacaaaagaatattagaattctgtgaaagagcacaacttggagtgaagcagtatttgccccactacaacacacagcaagaatggagggcccattttggtcctcaatgggagacttttctgctgagaaagtccgtttatgatccattagcaatactcgcccctggccaacgtatatttcaaaaagcaataaccttctcatgaccacatttttattattaattattaaaaatctgaaaaaaaaaaagagaagaaaagtccttcatggcatgtgccaaaatgaaaaaaaaatgttatatgatccagacaggttttgacattgaccatacagaatgcaattgcaaaggaagaaggttcattgatagtagagaaaaagagggagaaaaagagattacaaaatgatgactggtgagatttgtatgccttgcaggttaatgaggaaagttgtcagtgtatgtaggtatgtaccattactgatggaaaaattgccttacgtgctgagtgtagcaccaaggcagcagggtccggctgagattagatcaacaaaacacattaatcattgtagggtttccaaagaacttataaatattatcagcgctagagccaatgtatagtactatcaattttgtaaacactcccttatttgttctctgtctcacatgtatccaaattcattaagattataattaaatacagatatttatgcatccaccacaaaaagatatcaatacgttcgcaacaaatacagataagatgatatataatgctgagtaacaaatactactattctagaaaattgcggaaaatgatataaaaatgggtatgcctaccctgaaggatgatgaat

SEQ ID NO: 123 - DNA, 5763 bp, Artificial Sequence
  Synthetic polynucleotide
ataaatggtagaaatctgtgggttcaaatgttcaattgctggggatcttcgtgatcatgatgattcatacacaatctctagaaacacgtacgcaaatattaattaatcaatttcctttttatagtctcctcacaattcacatgaaacttcatactctattatccgattccatttccatcgtatctttgaatttgacatttgtttgcccaacatgtaattaactttcccttctcatcttaaagatgtaacatgatatatattataacttgtaattaacccaatatttttaactctctatttttacactcatctgacatgtatttttatttttcatttttttttcttatcacatcacctcttacgtgtacaatttttctctttttcttatttctgtcttccataatagtaattaatattcatcggtccgatatgtatacagcccaaaaaagtgtgtaaaatcatttttgtatttctaaccctctctttctcatgcaagctagcttcttctttctatttatagcccttctcccttcacccaccaacacaccacaactccaaactttttcctcttgttctcttcttcttcaacacaactagtcataatccagctcatctctctctccctctctctttgttctctctttctctttctccaaaatggctctaaactacccttttttaacctacttcatactactgctagtaaccatgtttgatattcactgtgggaaaaactgagcaatggaaagctccgattctaccagagcttgacattgataacatatcccacaaactccatgatgaccctgaaaccattcaaatggcttcaagggactatggccatttaacgcatgaattcccattagctgtgtttcgtccatcttctatagatgacatagtcaccttgataaaatcttcgtacaatagctttgccccttttgacatagctgcgaggggccaaggccactccactcatggacaagccatggctcgtgatgggattgtggtggacatggccagcctaagaaaacaaagaaatggggttgcgattagtgtctctaaggaccctttgatgggtcactatgctgatgttggaggggaacaactctggattgatgtgctacatgccacacttgaatatggacttgcaccagtttcttggactgattatttgtacttgaccgtgggagggacactttctaatgctggaatcagtggccagagcttccgttatggacctcaaatcagcaacgttcatgaaatggatgtcatcactggtatggagttagttgttttttttaatcaataaatgttaatattattagcttgttagttttttttgaaaaaattgaattaactttcgtttcctcttttctttctttttttaaccacacaattaatctaataactactggtattaagttagtttattttccatttttcatatataagttaggatttctaattaaaattgacatttcgtaccaccactacaaaaaaataatgtatcagtggcacaaaaaaatatattggcatcacttgtttttttagtcattaatattttgtagcatcacaaaaaatatggtgacaagttttctaaaaattacaaattaactgattcgtcagtgatgttaatgattttttagtgcgtcttggcaactaatgttttcatcttatataaaattagaaacaatagcggcaacagcacctgacattgtgtttgtgttttgcgtgtttctatcgcctaatttttgttgagaacgtgttcgtgaaacttggaaaaagagaaaattgaaattttcttgagatatctaccacttaagaaaaacaaatggctgtttccgttttgtctcttatgacatgacatggtacgtcatagatgaagttctgctaaatatatttgatatgatttcttgaacacgttttatatattcccacttcccagttagtgtggttgttgaatctaattaaaacaggaatagtctttgtctacaatatgggtgagcgatgcaaactttccaagggtttagaagttagaactatataggtccacggtcataattttatattcttgattaactttatgttggttaagtcgttcatatttggtcaattcattcatatgagaaaatactgaaatacaaacatggaaaaatgttaattactcttataattggcgcatgcatgcatctaaattatatgattttaataaatagtttttgtcatctacttgatttcaggaaaaggagagttcgtaacatgctcttcacagaagaacttggagttattccacgcggttcttggaggcttgggacaatttggagttatagcaagggcgagaattgctcttgagccagcacccaaaagggtacgtttatagagaattgactagaattttgtcttgtagcttttcctccaccaattcatatagtgacacctaatcgaattgtcatttttttttacggtgaattgtcattttgtaaatctaccaagtggtagttggcacccatatatgtatgaactatagtaccatacatttcattttatgttggtgtgttagtcatccatgatgaacacatacacaaatgaaaataggacgagttatacgtacgtaagggtttgaatcactgaatgtggatttttgaagttgaaagcatattaatcttggtttgaaaaagaaaaaaaaaatcggaagtccctcttgaagttatcatgactcttatattaagccaatagaattagaaaaactataattatgaatgatcatgttaattctttcagtgacttaaaatcttatctacaaaaagtacccttttgaaaaagaccttcacttaagtccatgcatacagtactaatcttacatacttgagagttgagacttgaagcatgaggagatttgaagtctggagaaacaagccaccacatattaattactaccgtattcttatctttatttatccttccaattttgatgggactggttgcacatacattcatacatactaacatacataaatacgtctctctctcatgtatttcattttattatattctatttcgttagtaagtttactagtataagacattattaatggtgaatttttgttggcatgcaggttaagtgggtcagactactttatagtgacttttctgcttttaccaaagaccaggaacgattaatctcaatcaatggaaggaaacaaaagaacgcattggattttctggaagggatgctgctaatgaaccaaggccccataaataattggagatcctctttcttccctctatctgaccatcccagaatagcttctttaataactgaacatagcatcctctactgtcttgaagtggctaaatattatgacgaacaaaccgagttaaatgtggacaaggtaacctcgtctagtcatatctattatatatagttagatcttgtcacatttctttgtttaaaaaataaaataaaaggcacaatcccaaaaagtcaaaagcaaatgcctagatattgtgtgttttcttggatattaattattacaccttaataacccataataatttttttatttttctttgtctctgtaggaaattgaagttttgctccaaggactagcctatatccctggatttaattatgagaaaaatgtctcgtacgttgagttcttgaatagggtccgaagtggagagttgaaacttcagtcacaaggactgtgggaagttcctcacccgtggcttaatttgtttataccaaaatctcaaatcttggattttaattcaggagtattcaaagatatagttcttaaaagaaacatctcctctggaccagtcttggtttatcccatgaatagaaacaagtaagccttgaatgcatgaatcacaatctagtgtcattataattcaggagtgtgtgatgcaatcttttaattttctgaccattcaactcaatatcaattttatttcttttttcaattaaaatgcaaaagagaataataattaataatatgaaatttaattccaggtgggacgataggatgtcagcatctataccagacgaggatgttttctacacagttgggtttttgcactcaagtgggtttgatacttggaaggcatatgatgctcaaaacagagaaattttggagttctgtagagatgctggcatcatggtcaagcaatatcttcccaaccacagcacacaagaagattggacaaaccattttggtgctaaatggatgaaattcttagaaagaaaacatcagtttgatccaagaatgattctatcacctgggcaaaaaatcttccacaaaaaattacagccagtgttttaaatattttccctaataaaaaaagtaaaaatgttttgtggtgggactacctcaattagatggctagctagggacaggtgtacatacagtgtgaccaagaccaagatggcttttgtatgctaaagtttgcattgctagctagagaaattaataaggtggggcattaaaggctgcatgagtacttttggcacctattatgctacatattaccttagatacgttaggttgacaaagtcgtactggtaggtacaagaagcacagttgtctctcacactgtctgtcacccaacttgctatatagtgtgtggagaaattcggatcatattgaagatgctgtgagttatagtcctccaatattaaatgtttaacgattctgtctttctcttatataattttgttttgcattatattactttcgcactggtgcaaacatatatatcaatgattataattaatttatacaatgacgagtataattgtacccaagttgcatgccataatatttgtcaaaaacaaaaagttgtatgccataatcaatccaggttgctagataataagatagatatgaatatgataacataaaatgctattaaagcaacaaataaacaataacacatagtccttatagggttcataattgatcgatgaacctagctagacgttgattttaggttaatttccagcgaggataaaatttattatataaagaaataactaaccaacacaaaataataaaaaattaaaaaaaaacgaagaaacttattttagagatataatttgttttagtatttgattgtaatttgagagattagctaggctctcaccaagtgagatctagagtatattcttaagaaaatatttataataaagaacccttaaacattttgcaaaacaaagggtggaattaatattaacaacaataattataatatcttgaaaattttatgaaaataatatatatatatatatatatatagagagagagagagagagagagagaaaattctcacaaacaatttttatctgttatttcaaattggtgtatgactccttagtccttagttcatttgtttgcacccagtcctgtcttaggtagttgattttatagttaggtaaattaatttctcgcactcttcgcttgattgtcatttatgggttgaactgttgaagtgattttatattttttaataaatttcacctgcaaaaaaactcaccattagcatacgccccccccccccccccccccccctctcccaaaaaaaaaaaaaaaacgaaagaagattaattagaaagaataaggtcgtgaaatgatgttacaaataaggcatatcagaatcagacgcaagggaagaataaaaacgttacaacaattcgcgcacaatgcaccccaaaaaaaaaatgacaggcacacataccttaaggaagaagaatcaacgctttca

SEQ ID NO: 124 - DNA, 5754 bp, Artificial Sequence
  Synthetic polynucleotide
ataaatggtagaaatctgtgggttcaaatgttcaattgctggggatcttcgtgatcatgatgattcatacacaatctctagaaacacgtacgcaaatattaattaatcaatttcctttttatagtctcctcacaattcacatgaaacttcatactctattatccgattccatttccatcgtatctttgaatttgacatttgtttgcccaacatgtaattaactttcccttctcatcttaaagatgtaacatgatatatattataacttgtaattaacccaatatttttaactctctatttttacactcatctgacatgtatttttatttttcatttttttttcttatcacatcacctcttacgtgtacaatttttctctttttcttatttctgtcttccataatagtaattaatattcatcggtccgatatgtatacagcccaaaaaagtgtgtaaaatcatttttgtatttctaaccctctctttctcatgcaagctagcttcttctttctatttatagcccttctcccttcacccaccaacacaccacaactccaaactttttcctcttgttctcttcttcttcaacacaactagtcataatccagctcatctctctctccctctctctttgttctctctttctctttctccaaaatggctctaaactacccttttttaacctacttcatactactgctatttgatattcactgtgggaaaaactgagcaatggaaagctccgattctaccagagcttgacattgataacatatcccacaaactccatgatgaccctgaaaccattcaaatggcttcaagggactatggccatttaacgcatgaattcccattagctgtgtttcgtccatcttctatagatgacatagtcaccttgataaaatcttcgtacaatagctttgccccttttgacatagctgcgaggggccaaggccactccactcatggacaagccatggctcgtgatgggattgtggtggacatggccagcctaagaaaacaaagaaatggggttgcgattagtgtctctaaggaccctttgatgggtcactatgctgatgttggaggggaacaactctggattgatgtgctacatgccacacttgaatatggacttgcaccagtttcttggactgattatttgtacttgaccgtgggagggacactttctaatgctggaatcagtggccagagcttccgttatggacctcaaatcagcaacgttcatgaaatggatgtcatcactggtatggagttagttgttttttttaatcaataaatgttaatattattagcttgttagttttttttgaaaaaattgaattaactttcgtttcctcttttctttctttttttaaccacacaattaatctaataactactggtattaagttagtttattttccatttttcatatataagttaggatttctaattaaaattgacatttcgtaccaccactacaaaaaaataatgtatcagtggcacaaaaaaatatattggcatcacttgtttttttagtcattaatattttgtagcatcacaaaaaatatggtgacaagttttctaaaaattacaaattaactgattcgtcagtgatgttaatgattttttagtgcgtcttggcaactaatgttttcatcttatataaaattagaaacaatagcggcaacagcacctgacattgtgtttgtgttttgcgtgtttctatcgcctaatttttgttgagaacgtgttcgtgaaacttggaaaaagagaaaattgaaattttcttgagatatctaccacttaagaaaaacaaatggctgtttccgttttgtctcttatgacatgacatggtacgtcatagatgaagttctgctaaatatatttgatatgatttcttgaacacgttttatatattcccacttcccagttagtgtggttgttgaatctaattaaaacaggaatagtctttgtctacaatatgggtgagcgatgcaaactttccaagggtttagaagttagaactatataggtccacggtcataattttatattcttgattaactttatgttggttaagtcgttcatatttggtcaattcattcatatgagaaaatactgaaatacaaacatggaaaaatgttaattactcttataattggcgcatgcatgcatctaaattatatgattttaataaatagtttttgtcatctacttgatttcaggaaaaggagagttcgtaacatgctcttcacagaagaacttggagttattccacgcggttcttggaggcttgggacaatttggagttatagcaagggcgagaattgctcttgagccagcacccaaaagggtacgtttatagagaattgactagaattttgtcttgtagcttttcctccaccaattcatatagtgacacctaatcgaattgtcatttttttttacggtgaattgtcattttgtaaatctaccaagtggtagttggcacccatatatgtatgaactatagtaccatacatttcattttatgttggtgtgttagtcatccatgatgaacacatacacaaatgaaaataggacgagttatacgtacgtaagggtttgaatcactgaatgtggatttttgaagttgaaagcatattaatcttggtttgaaaaagaaaaaaaaaatcggaagtccctcttgaagttatcatgactcttatattaagccaatagaattagaaaaactataattatgaatgatcatgttaattctttcagtgacttaaaatcttatctacaaaaagtacccttttgaaaaagaccttcacttaagtccatgcatacagtactaatcttacatacttgagagttgagacttgaagcatgaggagatttgaagtctggagaaacaagccaccacatattaattactaccgtattcttatctttatttatccttccaattttgatgggactggttgcacatacattcatacatactaacatacataaatacgtctctctctcatgtatttcattttattatattctatttcgttagtaagtttactagtataagacattattaatggtgaatttttgttggcatgcaggttaagtgggtcagactactttatagtgacttttctgcttttaccaaagaccaggaacgattaatctcaatcaatggaaggaaacaaaagaacgcattggattttctggaagggatgctgctaatgaaccaaggccccataaataattggagatcctctttcttccctctatctgaccatcccagaatagcttctttaataactgaacatagcatcctctactgtcttgaagtggctaaatattatgacgaacaaaccgagttaaatgtggacaaggtaacctcgtctagtcatatctattatatatagttagatcttgtcacatttctttgtttaaaaaataaaataaaaggcacaatcccaaaaagtcaaaagcaaatgcctagatattgtgtgttttcttggatattaattattacaccttaataacccataataatttttttatttttctttgtctctgtaggaaattgaagttttgctccaaggactagcctatatccctggatttaattatgagaaaaatgtctcgtacgttgagttcttgaatagggtccgaagtggagagttgaaacttcagtcacaaggactgtgggaagttcctcacccgtggcttaatttgtttataccaaaatctcaaatcttggattttaattcaggagtattcaaagatatagttcttaaaagaaacatctcctctggaccagtcttggtttatcccatgaatagaaacaagtaagccttgaatgcatgaatcacaatctagtgtcattataattcaggagtgtgtgatgcaatcttttaattttctgaccattcaactcaatatcaattttatttcttttttcaattaaaatgcaaaagagaataataattaataatatgaaatttaattccaggtgggacgataggatgtcagcatctataccagacgaggatgttttctacacagttgggtttttgcactcaagtgggtttgatacttggaaggcatatgatgctcaaaacagagaaattttggagttctgtagagatgctggcatcatggtcaagcaatatcttcccaaccacagcacacaagaagattggacaaaccattttggtgctaaatggatgaaattcttagaaagaaaacatcagtttgatccaagaatgattctatcacctgggcaaaaaatcttccacaaaaaattacagccagtgttttaaatattttccctaataaaaaaagtaaaaatgttttgtggtgggactacctcaattagatggctagctagggacaggtgtacatacagtgtgaccaagaccaagatggcttttgtatgctaaagtttgcattgctagctagagaaattaataaggtggggcattaaaggctgcatgagtacttttggcacctattatgctacatattaccttagatacgttaggttgacaaagtcgtactggtaggtacaagaagcacagttgtctctcacactgtctgtcacccaacttgctatatagtgtgtggagaaattcggatcatattgaagatgctgtgagttatagtcctccaatattaaatgtttaacgattctgtctttctcttatataattttgttttgcattatattactttcgcactggtgcaaacatatatatcaatgattataattaatttatacaatgacgagtataattgtacccaagttgcatgccataatatttgtcaaaaacaaaaagttgtatgccataatcaatccaggttgctagataataagatagatatgaatatgataacataaaatgctattaaagcaacaaataaacaataacacatagtccttatagggttcataattgatcgatgaacctagctagacgttgattttaggttaatttccagcgaggataaaatttattatataaagaaataactaaccaacacaaaataataaaaaattaaaaaaaaacgaagaaacttattttagagatataatttgttttagtatttgattgtaatttgagagattagctaggctctcaccaagtgagatctagagtatattcttaagaaaatatttataataaagaacccttaaacattttgcaaaacaaagggtggaattaatattaacaacaataattataatatcttgaaaattttatgaaaataatatatatatatatatatatatagagagagagagagagagagagagaaaattctcacaaacaatttttatctgttatttcaaattggtgtatgactccttagtccttagttcatttgtttgcacccagtcctgtcttaggtagttgattttatagttaggtaaattaatttctcgcactcttcgcttgattgtcatttatgggttgaactgttgaagtgattttatattttttaataaatttcacctgcaaaaaaactcaccattagcatacgccccccccccccccccccccccctctcccaaaaaaaaaaaaaaaacgaaagaagattaattagaaagaataaggtcgtgaaatgatgttacaaataaggcatatcagaatcagacgcaagggaagaataaaaacgttacaacaattcgcgcacaatgcaccccaaaaaaaaaatgacaggcacacataccttaaggaagaagaatcaacgctttca

SEQ ID NO: 125 - DNA, 7387 bp, Artificial Sequence
  Synthetic polynucleotide
ttaaatcggttcaaaattgttgaatcgatccaaaactagtaaatacagtaggttaattgatttcacttgaaatttaaaaaaaaaaaattaaaatgacgtcattttagtttttttttaaattattataacttatatgacatttttaagtgaagtttactttttattattattaatttatgcatactaggtttctgaaatattatattaaaatattatatatatatatatatatatatatatatatatatatatatatatatatatatatatatatatattattaaaatcaattccacttcgattgagctattaacttttgaaccaatatcttccccagttcaatgaccatccaagtctgaaaacattggttaccatcaacgttacccttccgtgaattggaaaagttaatgcaatataggttgatccaaggataagtcctatggtcccagaaagaaaatcttgagagatccttttgataattacccgagtttttactctctccttttaattcacgaaattggaaacttcaattgctaatataaaaagaattttgttagccaatatcatcagggtattgtcaaagaattacaagaaaaaaaaattataagataacataaaaaaataaaaaacaacataattttatatattttaataaaaaattcttttaatttttttttatcaatattctatagttactggcatttgacatgtaaaaatgtaaacatatgaattgataaaatttgaccaatgtttgaccctgagataggaatccaacggccccagttcaattgcaatcttttatttttactacgtgaaggcccaacaatggagaaccttgtggattttattgctgagaatctgtggttacgatgatgacacaccaacacaatcacagaaagcaagtaccgtttggaaggcctaacacttcattaattgcttcattaaatttattttactttctagctgctcaatttaattgctttacacaaatacttcatgacgtttcagaaggagggccaaatacaatctctacaatggttccatcgtatctttgaatttgacatttagcatccctccctttgcacaatgtacaatttgcattttgaatatttttttctcaccttcatatcgtgggactacttctataaccatcctggtgaaaataaataaagcgagggaattacgtaattaaacatatttaaatttctctctcctctgtttaattaatttatcaaaaacaaatatgtgtgcgagtatttaaaaatgtgtaaagtattattattttttaatttttcttttttccttctcatcaatgataaatatactttttaatataaaaatcaaacaataactataaaaaaaacatcttcacttcaattcaacattaaataaaaaataatccctgctttgttattttttacccaccaattatcatatttgttatttattatttttttatgttcttgctataaaggaaatcactatttgactcacacaaaactataaaggaatcaaataatcaattattatttaaaaactctattaaaataacaattacaacaaaatcccttatttttttcttccttatcattattaaaccttcccattctctctttctatctctacatgtttttctcaaattaaatattttctatatcctcctttatcatgcaaattaaagtcctcttccattctatatatagccgctacctcctccacctcctttccccactacaacacacaaacaccaacaaccaaatcaatccatccaccctagaaacaacaaagcactctctcttctctcattctattatcttctctcatcctcttattctctccaaaccaacaaaaaaaaaatggttgctgagaactacccttctcccacatacttcatcctcataacacgtttgatctccacagtgggcaaaacctcccaatggacgaaggccctgtcgctgcctccggaactcgcctccgtctccctcgacgacaccatcttctgcaagctccgtgacgacccagaggccctccagggaagggcctccagggactacgggaacctcgtccgcgaggttcccttggcagtcttccacccagcctcagcgagcgacatcgcgaggctgatcaagctgtcgtacaacggctctgtccccttcaagattgcggcgagggggcaagggcactcgacaaggggccaggcgatggcacgtgagggggtggtggtggacatggcggggttcagagagagagggaatggagtggggataagggttgtgagtagtgtggaccctaataataagaatggttactactattatgcggatgttggaggggaacagttgtggatcgatgtgctacacgccacgctcgagcatggacttgcacctatgtcctggactgattacttgtacttgacgctgggagggactctctccaatgctggcatcagtggccagacattccgctatggtcctcaaatcaccactgtccgggaaatggacgtaatcaccggtaagaaaactttccattcaaccagttaacttacatgtttttagttttttagcttccaatatccaatagtttataacttgtaagcttcaattttatgttaatttataagctagttttaccctacttttgaaaattcaaggattttggtactacaataactcccttgtcaaactcgttcaattgttggcttagtatcaagtagactcttggatttttaggtgtactttaacaaccatgttaatttaattgatcagggttttaatattatggaaattggccattggacaacttggaatggaaggaaagcgggagatggaaagggaaaagaaattaattagaataattgttaatattagttgcgtgaaaaaaattaaatttgctgaattaaattatggttcatcacgactctatttgtggcaacaccaacgtgccgttttcagaacttcattgcaacagcggttatagtggcgtttattcaattcatattttaatgcatcagactgtgattgcgattgaaattttatgaaatcttgttttataaacttgttcttttgattaggaaacttgattctattttatatatatttaatgtaacgccgaattaatggttgataaacgagtctttgtctaaaattttggcgaatgttagcaagcgttttccacgtggtcccgtacgtgtttgaaaaattcttaatcatggaatcagttcacacgggcagtcatagactcatagactccaattcttgattaattgttttcttattaatattggtccatggtcttattttggtcaattctttttattaaaaataaacgggctgctgaattttaatttactcaagtgtttgttaatgaatatgtgtgcatgcatgcaattatatatatatatatatattactattatttatttgtgttttaatcaaattttggtttggttcaggaaagggagaatttgtgacttgctctcagcagacgaattcggagttgtttcacgcggttcttggaggcttaggacaatttggaattataacaagggcaagaattgctcttgcgccagctccgaagagggtacgtttaaaatcttcggaattgactaggacttgtcttgttgcttcttcctccaacatctctcatatagtaacgcaaatttctaaatatgttacattattaattcaaccaccaagctttgcggaagcatcaaatgtcgttgtcctgaaagcttcatgtcatcatttttcttggcacccatatacacacacatacgtttcacattgtgtcagtgcatattagtcatccatgaaagacacatgtacaaatgaaaacgagaggagttatattaaaatgtgtgttggaaaaatatatatcatattttcataagtcttaattttgaaattaatatacagtaaccctttgagaccttagcaattaagccaataaaaaggctcgtattaaccccaaccaacaactattagaaaatactaacaagtataggtgtatacataaatgattcatttgaattttagtaccttaattatttaactttatccttctatttgacgggactcgttgcataagccatacatacataatcatgcgttcattattgtttttcattatgagttaatgagttgattgtatgaactaatggtgaatttttgttggcaggttaaatgggtgagacttttgtacaatgacttttctgcttttaccaaagaccaggaacaactaatatctatcactggaaggaaacaaaatgtttcactggattatttggaaggattgctgctaatgcaccaaggacccataaataattggagatcttctttcttccctttagccgaccatgcccgaataatttcgctagtaactaaacacagcgtcctctattgcctagaagttgccaaatattatgatggccaaaatgaaaacaatgtggacaaggtaccatctccattcatgtgcatttgccttgatgatgtttcttctattttttcttttaatgttttgatctcaccttatataataaccctttatcacactcaatcttgttatatttttaagagtttaatgataatattatgattttgttgtgaaaaaagagagtttaattgttattatataatcacaaattatcattaatatgacttttaaaataattaataatataaaaattaataaatttatcgtatttaatgagttataattaaatgatcatataaaattattttatattattaacatatagtttttttttctatttttaatatttgttttactataagttgttatattttcaatcttttttctagtataagttttaataatcaatattgtaagtaatattctcatttttcatgttgtgtaggaactccaagttttactacaaggattgagctatatccctggattttactatgaaaaagatgtctcatattttgagttcttgaatagagtccgaagtggagagttgaagctacagtcacaaggactatgggatgttcctcacccgtggcttaatttgtttataccgaaatctcaaatcatggaatttgactcgggcgtgttcaagaatatcatccttaaacgaaacatcaccacaggacctgtcttggtttaccccatgaatagaaacaagtaattgagcttaactaactaatctcaacttatgttgttatcattaggaaaaatgttaattggtacgaaaactatatataccactattttcatttaaattcatgaaagtgaaatttctctttcctaaaacaaattctttctcttaaaatgaatttttgtttttctcaatctccatcaattacttatttccttttttgaatgtttgaaaagtcattcacaacattttcttcataaaagggttattcgtaccaatttaaatagaattgccgttattatcagatgtacaattcttctcttcactcacttcttttccattaaaattgtaaaaaaaaaataaaaaaatcaggtgggacaataggatgtcagcatcaatacccgatgaggatatcttctacacagttggatttttgcattcaagtgggtttgataattggaaggcctatgatgctcaaaataaagaaattctacaattttgtaacgttgctgggatcaaggttaagcaatatcttccccactatcgcacacaagaagattgggcaaaccattttggccctaaatggaggacttttgtagaaagaaaacaccagtttgatccaagaatgattctatcacctggacaaagaatctttaacaattaaaatagctttaaaaatatatattcccccccccccccccccccccaaaaaaaaaaaaattatataatatggtgggactacccaagttagctagctggctgatcacaagtgtgcacataggacccagaattcagatgatagcctttgtacttgtttttgttaagagggtggggttaaaagctgcatgactttggcatatatgtagatcaggttacacatactttagatacgttaggttgacaaaatcatgtgtgaaataagatgcacacagctagctgtgtacctttctttctctctgtccctcaatttgtctatcactaaaaagatttctatatagtttagaacctagtgaagagaaagaaaaaaccattatattgaggatttaattttatcacgttctaatcctatacattaatattcttaaatgtgcaatgagtgtgctcggtgccttaatgattctttatctttgttaattgttatattgtagggttttgtttttgccttcctaattttgtaacaggggcacccctagcaataattgagatcctaggttaactaaggaacagcattattgtgtctaaattgagattcctagctgtatgccataataataaatcatcgtaggttgctagatagatgtgatagcgccaaatgccttccaatactataatctccattgcaagatccttcgttgtgattgtgtagaaaagattacgctgctttacaagagaatactccaagaaagcaagtgattgctccttaatataaagaatcatgcaataaacaaatggtgtcgtaatccataaagtgtatttaatatttgatgaaagagtagtgtagacatcaaacaaaataaagtttgatgcaattcgaattatagatacttgattaatctctaaattatgttgagacaatcatatttgaatttgataagactattatgaacgataaaaaatattataaataataaaaaaatttcatcaaacatttaatacaattatataccttactcaaatttgaaaacctgtacatataggaaaaaaacctttactaaaagaggttaaactcaccatacggatttttatatgtcgaagggatctttaattgtccatcggaaaacatcctaattcataaaaaaggaaagaaagtttagacatgaataattacggaccaatgaatgcaacctacgtctctcaattttaaggagaatttaggaatattatagtatatcactgaaagtacacacaagtggcaatgatgaatattttaatttaaagttttaattggattcgaaattaatcccttcttttttccagaaaaaataataatcatcgagtaatcaagacaatttcccaagtagacaacaagaatacaaaagagaatacgtgacttcgtttcaccatagaaaagaaggaatgcaataacgatgataataattataaaatgaaattgacaaaatatctaaatgcctgtagatatttctacagcgaatgataagtgtttttccattaaaaataagtttcttttgttaagaatttctaacatttttagttccaaaatataggaatgaagccaataagtaagtaagaatttctaacgtctgaaag

SEQ ID NO: 126 - DNA, 7378 bp, Artificial Sequence
  Synthetic polynucleotide
ttaaatcggttcaaaattgttgaatcgatccaaaactagtaaatacagtaggttaattgatttcacttgaaatttaaaaaaaaaaaattaaaatgacgtcattttagtttttttttaaattattataacttatatgacatttttaagtgaagtttactttttattattattaatttatgcatactaggtttctgaaatattatattaaaatattatatatatatatatatatatatatatatatatatatatatatatatatatatatatatatatattattaaaatcaattccacttcgattgagctattaacttttgaaccaatatcttccccagttcaatgaccatccaagtctgaaaacattggttaccatcaacgttacccttccgtgaattggaaaagttaatgcaatataggttgatccaaggataagtcctatggtcccagaaagaaaatcttgagagatccttttgataattacccgagtttttactctctccttttaattcacgaaattggaaacttcaattgctaatataaaaagaattttgttagccaatatcatcagggtattgtcaaagaattacaagaaaaaaaaattataagataacataaaaaaataaaaaacaacataattttatatattttaataaaaaattcttttaatttttttttatcaatattctatagttactggcatttgacatgtaaaaatgtaaacatatgaattgataaaatttgaccaatgtttgaccctgagataggaatccaacggccccagttcaattgcaatcttttatttttactacgtgaaggcccaacaatggagaaccttgtggattttattgctgagaatctgtggttacgatgatgacacaccaacacaatcacagaaagcaagtaccgtttggaaggcctaacacttcattaattgcttcattaaatttattttactttctagctgctcaatttaattgctttacacaaatacttcatgacgtttcagaaggagggccaaatacaatctctacaatggttccatcgtatctttgaatttgacatttagcatccctccctttgcacaatgtacaatttgcattttgaatatttttttctcaccttcatatcgtgggactacttctataaccatcctggtgaaaataaataaagcgagggaattacgtaattaaacatatttaaatttctctctcctctgtttaattaatttatcaaaaacaaatatgtgtgcgagtatttaaaaatgtgtaaagtattattattttttaatttttcttttttccttctcatcaatgataaatatactttttaatataaaaatcaaacaataactataaaaaaaacatcttcacttcaattcaacattaaataaaaaataatccctgctttgttattttttacccaccaattatcatatttgttatttattatttttttatgttcttgctataaaggaaatcactatttgactcacacaaaactataaaggaatcaaataatcaattattatttaaaaactctattaaaataacaattacaacaaaatcccttatttttttcttccttatcattattaaaccttcccattctctctttctatctctacatgtttttctcaaattaaatattttctatatcctcctttatcatgcaaattaaagtcctcttccattctatatatagccgctacctcctccacctcctttccccactacaacacacaaacaccaacaaccaaatcaatccatccaccctagaaacaacaaagcactctctcttctctcattctattatcttctctcatcctcttattctctccaaaccaacaaaaaaaaaatggttgctgagaactacccttctcccacatacttcatcctcataaccataacacgtttgatctccacagtgggcaaaacctcccaatggacgaaggccctgtcgctgcctccggaactcgcctccgtctccctcgacgacaccatcttctgcaagctccgtgacgacccagaggcctccagggactacgggaacctcgtccgcgaggttcccttggcagtcttccacccagcctcagcgagcgacatcgcgaggctgatcaagctgtcgtacaacggctctgtccccttcaagattgcggcgagggggcaagggcactcgacaaggggccaggcgatggcacgtgagggggtggtggtggacatggcggggttcagagagagagggaatggagtggggataagggttgtgagtagtgtggaccctaataataagaatggttactactattatgcggatgttggaggggaacagttgtggatcgatgtgctacacgccacgctcgagcatggacttgcacctatgtcctggactgattacttgtacttgacgctgggagggactctctccaatgctggcatcagtggccagacattccgctatggtcctcaaatcaccactgtccgggaaatggacgtaatcaccggtaagaaaactttccattcaaccagttaacttacatgtttttagttttttagcttccaatatccaatagtttataacttgtaagcttcaattttatgttaatttataagctagttttaccctacttttgaaaattcaaggattttggtactacaataactcccttgtcaaactcgttcaattgttggcttagtatcaagtagactcttggatttttaggtgtactttaacaaccatgttaatttaattgatcagggttttaatattatggaaattggccattggacaacttggaatggaaggaaagcgggagatggaaagggaaaagaaattaattagaataattgttaatattagttgcgtgaaaaaaattaaatttgctgaattaaattatggttcatcacgactctatttgtggcaacaccaacgtgccgttttcagaacttcattgcaacagcggttatagtggcgtttattcaattcatattttaatgcatcagactgtgattgcgattgaaattttatgaaatcttgttttataaacttgttcttttgattaggaaacttgattctattttatatatatttaatgtaacgccgaattaatggttgataaacgagtctttgtctaaaattttggcgaatgttagcaagcgttttccacgtggtcccgtacgtgtttgaaaaattcttaatcatggaatcagttcacacgggcagtcatagactcatagactccaattcttgattaattgttttcttattaatattggtccatggtcttattttggtcaattctttttattaaaaataaacgggctgctgaattttaatttactcaagtgtttgttaatgaatatgtgtgcatgcatgcaattatatatatatatatatattactattatttatttgtgttttaatcaaattttggtttggttcaggaaagggagaatttgtgacttgctctcagcagacgaattcggagttgtttcacgcggttcttggaggcttaggacaatttggaattataacaagggcaagaattgctcttgcgccagctccgaagagggtacgtttaaaatcttcggaattgactaggacttgtcttgttgcttcttcctccaacatctctcatatagtaacgcaaatttctaaatatgttacattattaattcaaccaccaagctttgcggaagcatcaaatgtcgttgtcctgaaagcttcatgtcatcatttttcttggcacccatatacacacacatacgtttcacattgtgtcagtgcatattagtcatccatgaaagacacatgtacaaatgaaaacgagaggagttatattaaaatgtgtgttggaaaaatatatatcatattttcataagtcttaattttgaaattaatatacagtaaccctttgagaccttagcaattaagccaataaaaaggctcgtattaaccccaaccaacaactattagaaaatactaacaagtataggtgtatacataaatgattcatttgaattttagtaccttaattatttaactttatccttctatttgacgggactcgttgcataagccatacatacataatcatgcgttcattattgtttttcattatgagttaatgagttgattgtatgaactaatggtgaatttttgttggcaggttaaatgggtgagacttttgtacaatgacttttctgcttttaccaaagaccaggaacaactaatatctatcactggaaggaaacaaaatgtttcactggattatttggaaggattgctgctaatgcaccaaggacccataaataattggagatcttctttcttccctttagccgaccatgcccgaataatttcgctagtaactaaacacagcgtcctctattgcctagaagttgccaaatattatgatggccaaaatgaaaacaatgtggacaaggtaccatctccattcatgtgcatttgccttgatgatgtttcttctattttttcttttaatgttttgatctcaccttatataataaccctttatcacactcaatcttgttatatttttaagagtttaatgataatattatgattttgttgtgaaaaaagagagtttaattgttattatataatcacaaattatcattaatatgacttttaaaataattaataatataaaaattaataaatttatcgtatttaatgagttataattaaatgatcatataaaattattttatattattaacatatagtttttttttctatttttaatatttgttttactataagttgttatattttcaatcttttttctagtataagttttaataatcaatattgtaagtaatattctcatttttcatgttgtgtaggaactccaagttttactacaaggattgagctatatccctggattttactatgaaaaagatgtctcatattttgagttcttgaatagagtccgaagtggagagttgaagctacagtcacaaggactatgggatgttcctcacccgtggcttaatttgtttataccgaaatctcaaatcatggaatttgactcgggcgtgttcaagaatatcatccttaaacgaaacatcaccacaggacctgtcttggtttaccccatgaatagaaacaagtaattgagcttaactaactaatctcaacttatgttgttatcattaggaaaaatgttaattggtacgaaaactatatataccactattttcatttaaattcatgaaagtgaaatttctctttcctaaaacaaattctttctcttaaaatgaatttttgtttttctcaatctccatcaattacttatttccttttttgaatgtttgaaaagtcattcacaacattttcttcataaaagggttattcgtaccaatttaaatagaattgccgttattatcagatgtacaattcttctcttcactcacttcttttccattaaaattgtaaaaaaaaaataaaaaaatcaggtgggacaataggatgtcagcatcaatacccgatgaggatatcttctacacagttggatttttgcattcaagtgggtttgataattggaaggcctatgatgctcaaaataaagaaattctacaattttgtaacgttgctgggatcaaggttaagcaatatcttccccactatcgcacacaagaagattgggcaaaccattttggccctaaatggaggacttttgtagaaagaaaacaccagtttgatccaagaatgattctatcacctggacaaagaatctttaacaattaaaatagctttaaaaatatatattcccccccccccccccccccccaaaaaaaaaaaaattatataatatggtgggactacccaagttagctagctggctgatcacaagtgtgcacataggacccagaattcagatgatagcctttgtacttgtttttgttaagagggtggggttaaaagctgcatgactttggcatatatgtagatcaggttacacatactttagatacgttaggttgacaaaatcatgtgtgaaataagatgcacacagctagctgtgtacctttctttctctctgtccctcaatttgtctatcactaaaaagatttctatatagtttagaacctagtgaagagaaagaaaaaaccattatattgaggatttaattttatcacgttctaatcctatacattaatattcttaaatgtgcaatgagtgtgctcggtgccttaatgattctttatctttgttaattgttatattgtagggttttgtttttgccttcctaattttgtaacaggggcacccctagcaataattgagatcctaggttaactaaggaacagcattattgtgtctaaattgagattcctagctgtatgccataataataaatcatcgtaggttgctagatagatgtgatagcgccaaatgccttccaatactataatctccattgcaagatccttcgttgtgattgtgtagaaaagattacgctgctttacaagagaatactccaagaaagcaagtgattgctccttaatataaagaatcatgcaataaacaaatggtgtcgtaatccataaagtgtatttaatatttgatgaaagagtagtgtagacatcaaacaaaataaagtttgatgcaattcgaattatagatacttgattaatctctaaattatgttgagacaatcatatttgaatttgataagactattatgaacgataaaaaatattataaataataaaaaaatttcatcaaacatttaatacaattatataccttactcaaatttgaaaacctgtacatataggaaaaaaacctttactaaaagaggttaaactcaccatacggatttttatatgtcgaagggatctttaattgtccatcggaaaacatcctaattcataaaaaaggaaagaaagtttagacatgaataattacggaccaatgaatgcaacctacgtctctcaattttaaggagaatttaggaatattatagtatatcactgaaagtacacacaagtggcaatgatgaatattttaatttaaagttttaattggattcgaaattaatcccttcttttttccagaaaaaataataatcatcgagtaatcaagacaatttcccaagtagacaacaagaatacaaaagagaatacgtgacttcgtttcaccatagaaaagaaggaatgcaataacgatgataataattataaaatgaaattgacaaaatatctaaatgcctgtagatatttctacagcgaatgataagtgtttttccattaaaaataagtttcttttgttaagaatttctaacatttttagttccaaaatataggaatgaagccaataagtaagtaagaatttctaacgtctgaaag

SEQ ID NO: 127 - DNA, 3640 bp, Artificial Sequence
  Synthetic polynucleotide
cttctcatccaatctaatagcaggatacgcgatgtttacattccgacaatagtggactcagtaccaacaccataaaaaaaaataaacaactagttatgtgtccataggggcaaaagaaaaagaaatacgcactactgtggaaagaagaaaaaaagcaataaggacttatttctatatccggaaaaagcatatatccttaaattggttaatgaacaaaaacttgaaacatgtctttccttcatgtttttgttgtaacttataacataacatgtaattgtttgtggttaccactgtttggaaaaagttgaagatttgtgagatctctcattgatgttacttttcctcttcaacttggcttctgtgtcactgtacatgtgatgcctttggcgtctctcttccttccaagtaagcagtccacatacgcattctcctcgtatcgtatgtcataagtcatgactgatcaacaatgctacgttgaccaagccaccacccacaaactcctttaaattctggcccaaacccttaagttcctgcattctccaatccatcactttctccttttcctcgtgttcacaaaatcacgctgcttaattattccttcaactaccatcatatcataccttctcaacagaaaaataaaaataaaaatgagatacatccttggagaacacaacattctgttcctcaaaagcttcgccttcacgatattattccttagttgcatagccattcggcttaacttgtgtctttccagcatcccttcttcactgcatttaaaatttgatcaagttagcctaagccatgcagcaagggactttggcaacaggtaccaatataatccaatggcagtgctgcaaccagaatcagtttctgatattgtagccaccataaggcatatctggctgatgggtcctggctcccacctcaccattgcagcgaggggccacggccactcgctgcagggtcaggctcaagcccatggaggacttgtgatcaacatggaatcactcaaggtcccagaaatgcaggtatatcgctaaatattaattgttaatcgttaattttttgttagctaggcaatcaaatccacaatcttttcctctcttccttcttcttatacaaccaaactaaccttataactccaatgcagatacatgttgatgagggaaacaagtctcctccatacgtggatgtctcaggtggcgagttgtggataaacatattgcatgagactctaagatacggcttggcgccaagatcgtggacagactacctgcatctcacagttggtggcactctctccaacgctggtgtcagtggtcagacatttaggcatggtccccagataagtaatgtacagcagctcgagattgttacaggtttgtgaaaaagagaatgaataataattgtttgtcttttctgaataataattcatttgatactggctgcatataagttttctaataaataatttttttcccctactttgatgagtaaaacatggtcaatgaatggatgcaggaacaggggaggtgttgaactgttccgcggagaataatggggatctctttcatggtgttctagggggcttggccaatttggcattataacccgggcaagaattgtcctagaaccagcacctaccatggtaatgcatcactcatcagtgactataccaaaacaagcttctttttttttggttttaatgtgtgctttgggtcatgactgaaaattttctatttattggaacaggtaaaatggattagagtgctgtactcagatttcacagcattcacaagagaccaagagaggttaatatctgcagaaaagacttttgactacattgaaggatttgtgataataaacagaactggtcttctaaataactggcgattatccttcaacccacgagacccggtccaagctagtcatttcaagtcggatggaagaactctcttctgccttgaaatggccaaatacttaaacgtggaagaaatcgatgcagcaaatcaggtgaggccagcaacactcaatctaatagatttttttgaaaataaagggataattaactccaaggttttaaaatatgagaccgtgggttgcaacatcaaagttttctaactctttgcgacccgaattgagactatgtcgatagcatttgtctatgatttgcccgtgatatcaacaaacacgaccaaaccacatgcgactgcgacctatatttaaaaccttgattaactcattagtgataatctttctttaggaaagaaaataaaagaggctaaatcaaccgtatctcacttttgtgtgtgcaggaagttgaggaacatttgtcccgtttaagctacatcccatcaactcttttttcaacagaagtcacatttgtagatttcttagacagggtgcacatatccgaggtcaagttgcgttcaaaaggcttgtgggatgttccacatccatggctcaatcttctaatacccaaaagccaaatactcaactttgcacaagtcgtcttcgggaacatcctatcagaaactagcaacggccccgtccttatctacccagtaaacaaatcaaagtaatgaatggttcagaaaaaaacatactattaactctagaaacaaatattttagccgtcaatattttttaattgacatgttttgttttgtttgcaggtgggacaacagaacttctgttgtgattccagaggaagatattttctacttagtggcatttcttacatctgcagttccatcttcaaatggaactgatggcctagaacacatactaagtcagaacaaaagaatattagaattctgtgaaagagcacaacttggagtgaagcagtatttgccccactacaacacacagcaagaatggagggcccattttggtcctcaatgggagacttttctgctgagaaagtccgtttatgatccattagcaatactcgcccctggccaacgtatatttcaaaaagcaataaccttctcatgaccacatttttattattaattattaaaaatctgaaaaaaaaaaagagaagaaaagtccttcatggcatgtgccaaaatgaaaaaaaaatgttatatgatccagacaggttttgacattgaccatacagaatgcaattgcaaaggaagaaggttcattgatagtagagaaaaagagggagaaaaagagattacaaaatgatgactggtgagatttgtatgccttgcaggttaatgaggaaagttgtcagtgtatgtaggtatgtaccattactgatggaaaaattgccttacgtgctgagtgtagcaccaaggcagcagggtccggctgagattagatcaacaaaacacattaatcattgtagggtttccaaagaacttataaatattatcagcgctagagccaatgtatagtactatcaattttgtaaacactcccttatttgttctctgtctcacatgtatccaaattcattaagattataattaaatacagatatttatgcatccaccacaaaaagatatcaatacgttcgcaacaaatacagataagatgatatataatgctgagtaacaaatactactattctagaaaattgcggaaaatgatataaaaatgggtatgcctaccctgaaggatgatgaat

SEQ ID NO: 128 - DNA, 3645 bp, Artificial Sequence
  Synthetic polynucleotide
cttctcatccaatctaatagcaggatacgcgatgtttacattccgacaatagtggactcagtaccaacaccataaaaaaaaataaacaactagttatgtgtccataggggcaaaagaaaaagaaatacgcactactgtggaaagaagaaaaaaagcaataaggacttatttctatatccggaaaaagcatatatccttaaattggttaatgaacaaaaacttgaaacatgtctttccttcatgtttttgttgtaacttataacataacatgtaattgtttgtggttaccactgtttggaaaaagttgaagatttgtgagatctctcattgatgttacttttcctcttcaacttggcttctgtgtcactgtacatgtgatgcctttggcgtctctcttccttccaagtaagcagtccacatacgcattctcctcgtatcgtatgtcataagtcatgactgatcaacaatgctacgttgaccaagccaccacccacaaactcctttaaattctggcccaaacccttaagttcctgcattctccaatccatcactttctccttttcctcgtgttcacaaaatcacgctgcttaattattccttcaactaccatcatatcataccttctcaacagaaaaataaaaataaaaatgagatacatccttggagaacacaacattctgttcctcaaaaattattccttagttgcatagccattcggcttaacttgtgtctttccagcatcccttcttcactgaaatcaattccccttgaagggcatttaaaatttgatcaagttagcctaagccatgcagcaagggactttggcaacaggtaccaatataatccaatggcagtgctgcaaccagaatcagtttctgatattgtagccaccataaggcatatctggctgatgggtcctggctcccacctcaccattgcagcgaggggccacggccactcgctgcagggtcaggctcaagcccatggaggacttgtgatcaacatggaatcactcaaggtcccagaaatgcaggtatatcgctaaatattaattgttaatcgttaattttttgttagctaggcaatcaaatccacaatcttttcctctcttccttcttcttatacaaccaaactaaccttataactccaatgcagatacatgttgatgagggaaacaagtctcctccatacgtggatgtctcaggtggcgagttgtggataaacatattgcatgagactctaagatacggcttggcgccaagatcgtggacagactacctgcatctcacagttggtggcactctctccaacgctggtgtcagtggtcagacatttaggcatggtccccagataagtaatgtacagcagctcgagattgttacaggtttgtgaaaaagagaatgaataataattgtttgtcttttctgaataataattcatttgatactggctgcatataagttttctaataaataatttttttcccctactttgatgagtaaaacatggtcaatgaatggatgcaggaacaggggaggtgttgaactgttccgcggagaataatggggatctctttcatggtgttctagggggcttggccaatttggcattataacccgggcaagaattgtcctagaaccagcacctaccatggtaatgcatcactcatcagtgactataccaaaacaagcttctttttttttggttttaatgtgtgctttgggtcatgactgaaaattttctatttattggaacaggtaaaatggattagagtgctgtactcagatttcacagcattcacaagagaccaagagaggttaatatctgcagaaaagacttttgactacattgaaggatttgtgataataaacagaactggtcttctaaataactggcgattatccttcaacccacgagacccggtccaagctagtcatttcaagtcggatggaagaactctcttctgccttgaaatggccaaatacttaaacgtggaagaaatcgatgcagcaaatcaggtgaggccagcaacactcaatctaatagatttttttgaaaataaagggataattaactccaaggttttaaaatatgagaccgtgggttgcaacatcaaagttttctaactctttgcgacccgaattgagactatgtcgatagcatttgtctatgatttgcccgtgatatcaacaaacacgaccaaaccacatgcgactgcgacctatatttaaaaccttgattaactcattagtgataatctttctttaggaaagaaaataaaagaggctaaatcaaccgtatctcacttttgtgtgtgcaggaagttgaggaacatttgtcccgtttaagctacatcccatcaactcttttttcaacagaagtcacatttgtagatttcttagacagggtgcacatatccgaggtcaagttgcgttcaaaaggcttgtgggatgttccacatccatggctcaatcttctaatacccaaaagccaaatactcaactttgcacaagtcgtcttcgggaacatcctatcagaaactagcaacggccccgtccttatctacccagtaaacaaatcaaagtaatgaatggttcagaaaaaaacatactattaactctagaaacaaatattttagccgtcaatattttttaattgacatgttttgttttgtttgcaggtgggacaacagaacttctgttgtgattccagaggaagatattttctacttagtggcatttcttacatctgcagttccatcttcaaatggaactgatggcctagaacacatactaagtcagaacaaaagaatattagaattctgtgaaagagcacaacttggagtgaagcagtatttgccccactacaacacacagcaagaatggagggcccattttggtcctcaatgggagacttttctgctgagaaagtccgtttatgatccattagcaatactcgcccctggccaacgtatatttcaaaaagcaataaccttctcatgaccacatttttattattaattattaaaaatctgaaaaaaaaaaagagaagaaaagtccttcatggcatgtgccaaaatgaaaaaaaaatgttatatgatccagacaggttttgacattgaccatacagaatgcaattgcaaaggaagaaggttcattgatagtagagaaaaagagggagaaaaagagattacaaaatgatgactggtgagatttgtatgccttgcaggttaatgaggaaagttgtcagtgtatgtaggtatgtaccattactgatggaaaaattgccttacgtgctgagtgtagcaccaaggcagcagggtccggctgagattagatcaacaaaacacattaatcattgtagggtttccaaagaacttataaatattatcagcgctagagccaatgtatagtactatcaattttgtaaacactcccttatttgttctctgtctcacatgtatccaaattcattaagattataattaaatacagatatttatgcatccaccacaaaaagatatcaatacgttcgcaacaaatacagataagatgatatataatgctgagtaacaaatactactattctagaaaattgcggaaaatgatataaaaatgggtatgcctaccctgaaggatgatgaat

SEQ ID NO: 129 - DNA, 8266 bp, Artificial Sequence
  Synthetic polynucleotide
ctacttctagaatgacaactactcctatggcaatatcaattgttagcggtggttcccttaagttcgagactaagggcagtctccaaaaggaagaaaggaaataacaaacttaagcctgaatgttctacgttttatttagtgtctcttgatatttaaaggtctatcaaatatgtataataaccgcacttccactataataaccacactcccactacgataatcgctacaataaccaccacaataactacttctaggatgacaactacctctatataagtttccatgacagaacatcttcttcctaacaccttacctatcacaaatgcttctcctctcggtgtcagagagtactattgattccctaagttctgacggtgtctttttctaaccaaagatccacttttcgaaggtcccgagccaattcgatgagagctcggaggcatagaactcggtttagtcacttatgccatgcttcatttcgtcgcgcgtactttaccaatcaacacacgccatcgagattgatctgcaagtgcagattacgtaagcgagaaaggatttgcaatggaattcacaaatcgcacaatcagagaacaggataagtgtactgctaattatgagcgccagggagtgtagattcatgtcttaggttttaaaattagaacagaataaatatgaaaattgttttttactttctatattttatattttaatttttttttagtttttattattagtaatattgttaattataattaattataaaaattttaacaagtaatttattactaatttatcataagataatttataataaaaaaataattgataatttataattaatttataactaattatttttatattttgtttagtaaagactaaaaggtaattaaaatgtaaattatagagattaaaatatcatttttaaactataagaactaaaaaagaattaaaatacaaactataagacaaaaaagatcacttttaaactataggaactaaaaaaattacttttaaattatatggactaaaaaataccaatcgtaaaattataggaactaaataaataatataaccttaaattttttattttaagatcaattttttaaaaaattaatgttaatcatgatattttatttataaaatatcaaaactcattttgtaaaatggattttcatcaaaataaacgttcactttgctatggtaaatcttgttttgtagtattttggttgttctgacccaaatgacccaaatgcaggctagtggacaatgacattgattgttttgtatatgggttgggtgtcccttgtatcctattgatatattccttttgccttattaagaaaaattgcattagaaactactatatattaaatgctctaacaattaatgattaaattgacaccacatcctgtttgactctccacttttcttttattggtactctctattttagtctgctctttatatacatgttaacttaaagacagcaaatttaccaaagtaacttatcttctctcttgaaagaaaaatgccacagaggaatttagtactattttccacaactattgctatctagcatagtgctcacacaagcacaaccacgatcatggtcagcattccaagcatccaaagaactagccacaaagcttagtcgtaaccctcaaacctttccacatgcctcaaccgattatgggcacatagttcacaaaaccccagtggcaattttcaatccatcttctgttagtgacatcttggccttgatacatttctcaaactctcttcctaacccattccccatagcccctagagggaaagcacactctgttcatggacaagccatgacaaaagatggggtggtgttgaatatgactaacctcaatagcagttttcaaaatgggttaggggttttggtgtctgcttgtgatggaaaaggtccattgatttgttatgctgatgtaggtggtggccaaatgtggatcgatgtcttgcatgcatcccttgaacgtggactcacacctttgtctttgactgattatatgtatgccactgttgggggcacactatctaatgctggcatgggtggcatgtcctttcgatttggacctcagatctctaatgttcttgaattggatgttattacaggtatgactcactcaattttatcaattaattttcttccatactcatctacacgcttgttcgaagtgaaacatttaactgaattttttttatcttggatatcacaattgtgtaatttttcgtctagatttgtgattatgttaattcaatctgtatatcttaataattatattaaagtccctccctccttcaattatctgtcaaatatttaacgaaatatatttatgtgacatttgagaatgttgatgggtttatatgtgttattttagtcgattagattttacgtgtgaagttttagtgtctcccaaattcttattaacattgtgggaaaaaatgagaaaacaatcgcagaactggagtttgattccagattattattattatttagtaattttattattatctatatcataatagtatatttattaactcatttaatatcatatttattacatatatttagtgtaataatagtatatttattacattctttttacatacaaaaagtcagaaagacttaaaagcttctacaaaaagaaatacctgttatatcagctcttaaagaattacatatgaaatcctacgcatttattacacacacacaaatatatatatatatatatacttaaacagaaatatgaattgttattatatttataattagtatttatattaatagaacaatttatagtttatactatggaataaatttttaaatataaatttattatttatattgatatactcatttatagtttttactaagatataagtttataaatataaatttgcacctcttgtgattttgaactggttttttaataaataaaaaataaataaaaagattataaatataaattattattacattaacataataatttacatttattaatttaatactaaatatatatagtaaatgtatcattaaatgaatgtagtaaacatattattaattttcagaaaagttttaatactttttcaccctagaaatatacaaattttttttaattgatataatttttttttgtttatgattcttgtattaatatttaaaccttccgttggagattaacgggtaaaaaatacaaggtttaaacattatataagtaaagttttcttacaacgacaaaacaaaactaattaatatatttacagctaatgatgtttgtttaaaaagtgctaattatatttttttgttctagtcaatgttgtatagttacccaacatataatcagtgacggactttttagttgtggggaaatattcattatatatatatatatatatatgaatcggtgctgcatataatacaatatatacaattttacactgaaaactgtatattattaaaatttatcaggaattatgcttaaatatcttattgtatctatcttattaaagaaatctaattatatctataaaataaaggtttatttcgatcgttttgatatattgtaaatattattttttttgtttgtttttctcgtataaactttaatacatctatatatgtggcttttatatatagggaaaggagaccttgtgacttgctccaaggagcagaactcagaggcattttacgctgctcttggaggattaggtcaatttggggtgataacaagagcaagaatacctctaggacctgcacctactagggcaagtattagtttcccctttcatatagatttcgtaagggtgaaaataaaaataatattttataggactaaaattaaactaatttcatataaacctaaattaaaactcactcaaattatagatgtattaaaatcatatttaatctatatatatgccatttaattttaattgaaacatacatattatatatagatcattttttcctgtaaacttagtcttagacactatacaacttcaatactattaaaattgtaccaaaattaactatcttaaaactaaaaatgagaataagtcgggtaattgacataagtctatgagctcacttgtttaaagcttggtctcatctatctaataaaaaaagttaaacttaaactttttaaaaagtctatttatttatataatttagacttggacttgtgaaaaaacttattaaactgtatagaccggtctaattattcatttaaatatagtaaaacattaaaatatattatacttttattttaatatcttaatatgttaatatatttttatcataaataaaatgaatatttgaaataaatagatctttaaatatgtaataagctaaactatatcatatcttaatttttataacatgccatacctatatatttatataacgtctaacttgacctaacatattatcacccctacttaaaaattatttatctatttatttttaacaaagtttttttcatgtgggtgtttgcaggtaaaatggctccgcctgctatacaacaacttcactgcattttcaagagaccaagaacatttaatatcgttcagtgaaaggaatgacattgctacagcagattatgtagaaggcatgcttctattgaatcagccgccactggatcttctcttttatccagcttctgatcatcaaagggtaacttccttggtaactcaatatggcattatctacatcttggagcttgccaaatactattacaataactctcaggcacatgtcaatgaggtaacttgaaataaaagttgtttttagcatctagttagaaacttcttttatttttattcttatttttttatggacaacatatataatgaatttagtaaagaaatacagagatattctaattgttatatattcatcatacatcaaagatcaaattaatcctcctgattgaaaagaattttgttttcatgaatccaaaagaaacatgtctcaaactcactcaaattgtatggaacccatatattaattaatttatgtacaattcattgttttttactaaattgattatttttcttgtttcttaaataggaagttgcatatttgctgaaagggttaaactttgtacatacatttgtgttcgaaagagatgtgtcatacgaggagtttgtgaacagagtttatcctttggagcaaatgcttaggtcagaaggactttgggaagttcctcacccttggctgaacctctgggttccaagatctagaatctcagattttgatgaaggtgttttcaaggacattgttcttaagcaaaatattactggcggaagttttctagtctacccaacaaacagaagaaacaagtaaattgattagattatttatttttttgtgagtgtcaaattattatctagatcacccgtctcctttaatttacatatcctttctagtgtttccaatatataaaaaaatgacacctcactaaaaaaaataacaaataagagaatttattgttttttaaccacatttttttattgagagaaaacactccacaagaaaaataataataacaacaaaataatttatgtaatttttaaaagaaaaggtcacttaaatttttgcaactctaaaattagttattgaaaaaaaaaacctcaagtctcacatttactagaggaacctcctaagttttttctaaaatgaatatatttctaaaggatatgagacttaaagttttttcaatattaatttacaacattgtgctctgattcaaagtcaagcaatctcctagaataaaagagattgaaaatagcactaacactattggtggggtttgtggtttgtggtctgtggatttaaatttggcatgtggtatttaacagaacttcaacagaggtataaattataaaagatttttttttctgagaaaaagaaataaatggaggtatgttattaaaagagggagtatgaataacaactgtcctaataatactccattgggcctgacagtaggagttgggccataacaattagggacaaaaaataattttggttactaaatttagtcaataattccttttcttagtcacattagatgtttctgttccaatttatttgcttatgtaaatgacttaatttatacatatgtgaggattaaattgaatcaacattatgcttcacaggtgggatgataggatgacaccaattacacctgacgaagatgttttctacgttgtagattttttgcgtgttgctaaaacgtttgatgtggtggacaaactacaggttcaaaacaaacagatactgcggttttgtaatgatgctggtattaagatcacagagtatcttatcgggaacaaaactcatcaacaatgggtggaacactttggcccaaaatggaaactttttgcagatagaaaaactgaatttgatcccaaaaaaatattgtcacctggacatgggattttccagtaaataatgtgctaggtttcagtgaaatctctcattttggaaattcatgaaataaaaatgaaattctgtaccagaaaaaaaaaaaaaaacttgttgtgtaattctgtgccaaacatacattgaattggattgaagttattatgcaattttgtacgaaaaaaaacttatgtatttgattattttatgtttttttattaatgttgaatgttcaaatattctcatgactcacgaacaacggcagatctagaagaaaaaaatggtcgtaagatgtgttgatggtatttaaatgaatgcatgtctacttcaaaatttatttgatagactcatttcgtaaaaaaaaaaaatagaaataacctatttaacaatacttgtttggaaaataaatttaaaaataagaaatttggtcgtttttttatatagaaaatagcattgtttttatgatattttaatgcaattcacgattttatgttgttgggtttttaaataaataaaagttacataaaactttagttttaaattttctttgggactgtgaatggagttaaactctaaaaaagatctataattccaaagtcaggttaccatcaaatattgacatatagcaaaaaaaaaaactactcccttgggaaaattatataaaatattaccttgtcaagagacttgcatttatacaaatgatttatttagcaaaattgttgcatcatgatcaaataggacaaacgttgctaaatcaatgtcactaggcattggcacccttacaagttacaagatacctttaagaaatcgaaaactatttttttcaaaccctttgttttgtgaattaactctttatgagctattttatccctctcaatcggaatataaagagatttttccttacatgacactagtggtctgatcctaagtttgagcttgctcgatgataagcaatgattttaagttttgggtgagaatatataaaaacattggttggagcgttttttgtttttatttttaaagaaaataaaaaataagaatgaaaatatatttatttaaaatttagaaaatattttttctgaatatatttttgaaatagaccaaaaactgaaaataataaatcaacattttcagtcttgtttgaaaaggtgaaaacagcgtggtaccttagagtgctttcttcttaatacattttttttaatcttaaaaatttgaaaatgaaaataaaaaataaacgctcaaatcaagctccacctaaatttttctctattgcaaatgttgaaaaaaatggaaaagcaaaagatctcaaagtaaaataaatatattgtcttttgttacattttgtttcaatgattgtggggaataattgaggtaggataagtggtaggaaaaaatatcaagcaacggataatggtaattgttttatataaaggtttaaatatatttttagtcttttaatttaaaattattattattttttagtccttaaaaacaaatatgcaaattttagtaatctaaaattttaaaatctagttttagtcttgttttgttaactctataacagaggttgtctgtgtggaaaatgatgtgcaattttgtggcgatttctttagtgtgaaaattttgttttaaatttaaatcaaacaaaatgtctcgcaaggcaacaataacgttgttgctgctaacaatcttcgtgtggcaaaatcaacagtggagaaaacgactatcaacaatgttagagaagagttgacgaaggaaaatggggaaaataggacaaacccgaacaaaaaaaccacccttgacttg

SEQ ID NO: 130 - DNA, 5765 bp, Artificial Sequence
  Synthetic polynucleotide
ataaatggtagaaatctgtgggttcaaatgttcaattgctggggatcttcgtgatcatgatgattcatacacaatctctagaaacacgtacgcaaatattaattaatcaatttcctttttatagtctcctcacaattcacatgaaacttcatactctattatccgattccatttccatcgtatctttgaatttgacatttgtttgcccaacatgtaattaactttcccttctcatcttaaagatgtaacatgatatatattataacttgtaattaacccaatatttttaactctctatttttacactcatctgacatgtatttttatttttcatttttttttcttatcacatcacctcttacgtgtacaatttttctctttttcttatttctgtcttccataatagtaattaatattcatcggtccgatatgtatacagcccaaaaaagtgtgtaaaatcatttttgtatttctaaccctctctttctcatgcaagctagcttcttctttctatttatagcccttctcccttcacccaccaacacaccacaactccaaactttttcctcttgttctcttcttcttcaacacaactagtcataatccagctcatctctctctccctctctctttgttctctctttctctttctccaaaatggctctaaactacccttttttaacctacttcatactactgctagtaaccataagtttgatattcactgtgggaaaaactgagcaatggaaagctccgattctaccagagcttgacattgataacatatcccacaaactccatgatgaccctgaaaccattcaaatggcttcaagggactatggccatttaacgcatgaattcccattagctgtgtttcgtccatcttctatagatgacatagtcaccttgataaaatcttcgtacaatagctttgccccttttgacatagctgcgaggggccaaggccactccactcatggacaagccatggctcgtgatgggattgtggtggacatggccagcctaagaaaacaaagaaatggggttgcgattagtgtctctaaggaccctttgatgggtcactatgctgatgttggaggggaacaactctggattgatgtgctacatgccacacttgaatatggacttgcaccagtttcttggactgattatttgtacttgaccgtgggagggacactttctaatgctggaatcagtggccagagcttccgttatggacctcaaatcagcaacgttcatgaaatggatgtcatcactggtatggagttagttgttttttttaatcaataaatgttaatattattagcttgttagttttttttgaaaaaattgaattaactttcgtttcctcttttctttctttttttaaccacacaattaatctaataactactggtattaagttagtttattttccatttttcatatataagttaggatttctaattaaaattgacatttcgtaccaccactacaaaaaaataatgtatcagtggcacaaaaaaatatattggcatcacttgtttttttagtcattaatattttgtagcatcacaaaaaatatggtgacaagttttctaaaaattacaaattaactgattcgtcagtgatgttaatgattttttagtgcgtcttggcaactaatgttttcatcttatataaaattagaaacaatagcggcaacagcacctgacattgtgtttgtgttttgcgtgtttctatcgcctaatttttgttgagaacgtgttcgtgaaacttggaaaaagagaaaattgaaattttcttgagatatctaccacttaagaaaaacaaatggctgtttccgttttgtctcttatgacatgacatggtacgtcatagatgaagttctgctaaatatatttgatatgatttcttgaacacgttttatatattcccacttcccagttagtgtggttgttgaatctaattaaaacaggaatagtctttgtctacaatatgggtgagcgatgcaaactttccaagggtttagaagttagaactatataggtccacggtcataattttatattcttgattaactttatgttggttaagtcgttcatatttggtcaattcattcatatgagaaaatactgaaatacaaacatggaaaaatgttaattactcttataattggcgcatgcatgcatctaaattatatgattttaataaatagtttttgtcatctacttgatttcaggaaaaggagagttcgtaacatgctcttcacagaagaacttggagttattccacgcggttcttggaggcttgggacaatttggagttatagcaagggcgagaattgctcttgagccagcacccaaaagggtacgtttatagagaattgactagaattttgtcttgtagcttttcctccaccaattcatatagtgacacctaatcgaattgtcatttttttttacggtgaattgtcattttgtaaatctaccaagtggtagttggcacccatatatgtatgaactatagtaccatacatttcattttatgttggtgtgttagtcatccatgatgaacacatacacaaatgaaaataggacgagttatacgtacgtaagggtttgaatcactgaatgtggatttttgaagttgaaagcatattaatcttggtttgaaaaagaaaaaaaaaatcggaagtccctcttgaagttatcatgactcttatattaagccaatagaattagaaaaactataattatgaatgatcatgttaattctttcagtgacttaaaatcttatctacaaaaagtacccttttgaaaaagaccttcacttaagtccatgcatacagtactaatcttacatacttgagagttgagacttgaagcatgaggagatttgaagtctggagaaacaagccaccacatattaattactaccgtattcttatctttatttatccttccaattttgatgggactggttgcacatacattcatacatactaacatacataaatacgtctctctctcatgtatttcattttattatattctatttcgttagtaagtttactagtataagacattattaatggtgaatttttgttggcatgcaggttaagtgggtcagactactttatagtgacttttctgcttttaccaaagaccaggaacgattaatctcaatcaatggaaggaaacaaaagaacgcattggattttctggaagggatgctgctaatgaaccaaggccccataaataattggagatcctctttcttccctctatctgaccatcccagaatagcttctttaataactgaacatagcatcctctactgtcttgaagtggctaaatattatgacgaacaaaccgagttaaatgtggacaaggtaacctcgtctagtcatatctattatatatagttagatcttgtcacatttctttgtttaaaaaataaaataaaaggcacaatcccaaaaagtcaaaagcaaatgcctagatattgtgtgttttcttggatattaattattacaccttaataacccataataatttttttatttttctttgtctctgtaggaaattgaagttttgctccaaggactagcctatatccctggatttaattatgagaaaaatgtctcgtacgttgagttcttgaatagggtccgaagtggagagttgaaacttcagtcacaaggactgtgggaagttcctcacccgtggcttaatttgtttataccaaaatctcaaatcttggattttaattcaggagtattcaaagatatagttcttaaaagaaacatctcctctggaccagtcttggtttatcccatgaatagaaacaagtaagccttgaatgcatgaatcacaatctagtgtcattataattcaggagtgtgtgatgcaatcttttaattttctgaccattcaactcaatatcaattttatttcttttttcaattaaaatgcaaaagagaataataattaataatatgaaatttaattccaggtgggacgataggatgtcagcatctataccagacgaggatgttttctacacagttgggtttttgcactcaagtgggtttgatacttggaaggcatatgatgctcaaaacagagaaattttggagttctgtagagatgctggcatcatggtcaagcaatatcttcccaaccacagcacacaagaagattggacaaaccattttggtgctaaatggatgaaattcttagaaagaaaacatcagtttgatccaagaatgattctatcacctgggcaaaaaatcttccacaaaaaattacagccagtgttttaaatattttccctaataaaaaaagtaaaaatgttttgtggtgggactacctcaattagatggctagctagggacaggtgtacatacagtgtgaccaagaccaagatggcttttgtatgctaaagtttgcattgctagctagagaaattaataaggtggggcattaaaggctgcatgagtacttttggcacctattatgctacatattaccttagatacgttaggttgacaaagtcgtactggtaggtacaagaagcacagttgtctctcacactgtctgtcacccaacttgctatatagtgtgtggagaaattcggatcatattgaagatgctgtgagttatagtcctccaatattaaatgtttaacgattctgtctttctcttatataattttgttttgcattatattactttcgcactggtgcaaacatatatatcaatgattataattaatttatacaatgacgagtataattgtacccaagttgcatgccataatatttgtcaaaaacaaaaagttgtatgccataatcaatccaggttgctagataataagatagatatgaatatgataacataaaatgctattaaagcaacaaataaacaataacacatagtccttatagggttcataattgatcgatgaacctagctagacgttgattttaggttaatttccagcgaggataaaatttattatataaagaaataactaaccaacacaaaataataaaaaattaaaaaaaaacgaagaaacttattttagagatataatttgttttagtatttgattgtaatttgagagattagctaggctctcaccaagtgagatctagagtatattcttaagaaaatatttataataaagaacccttaaacattttgcaaaacaaagggtggaattaatattaacaacaataattataatatcttgaaaattttatgaaaataatatatatatatatatatatatagagagagagagagagagagagagaaaattctcacaaacaatttttatctgttatttcaaattggtgtatgactccttagtccttagttcatttgtttgcacccagtcctgtcttaggtagttgattttatagttaggtaaattaatttctcgcactcttcgcttgattgtcatttatgggttgaactgttgaagtgattttatattttttaataaatttcacctgcaaaaaaactcaccattagcatacgccccccccccccccccccccccctctcccaaaaaaaaaaaaaaaacgaaagaagattaattagaaagaataaggtcgtgaaatgatgttacaaataaggcatatcagaatcagacgcaagggaagaataaaaacgttacaacaattcgcgcacaatgcaccccaaaaaaaaaatgacaggcacacataccttaaggaagaagaatcaacgctttca

SEQ ID NO: 131 - DNA, 5761 bp, Artificial Sequence
  Synthetic polynucleotide
ataaatggtagaaatctgtgggttcaaatgttcaattgctggggatcttcgtgatcatgatgattcatacacaatctctagaaacacgtacgcaaatattaattaatcaatttcctttttatagtctcctcacaattcacatgaaacttcatactctattatccgattccatttccatcgtatctttgaatttgacatttgtttgcccaacatgtaattaactttcccttctcatcttaaagatgtaacatgatatatattataacttgtaattaacccaatatttttaactctctatttttacactcatctgacatgtatttttatttttcatttttttttcttatcacatcacctcttacgtgtacaatttttctctttttcttatttctgtcttccataatagtaattaatattcatcggtccgatatgtatacagcccaaaaaagtgtgtaaaatcatttttgtatttctaaccctctctttctcatgcaagctagcttcttctttctatttatagcccttctcccttcacccaccaacacaccacaactccaaactttttcctcttgttctcttcttcttcaacacaactagtcataatccagctcatctctctctccctctctctttgttctctctttctctttctccaaaatggctctaaactacccttttttaacctacttcatactactgctagtaaccgtttgatattcactgtgggaaaaactgagcaatggaaagctccgattctaccagagcttgacattgataacatatcccacaaactccatgatgaccctgaaaccattcaaatggcttcaagggactatggccatttaacgcatgaattcccattagctgtgtttcgtccatcttctatagatgacatagtcaccttgataaaatcttcgtacaatagctttgccccttttgacatagctgcgaggggccaaggccactccactcatggacaagccatggctcgtgatgggattgtggtggacatggccagcctaagaaaacaaagaaatggggttgcgattagtgtctctaaggaccctttgatgggtcactatgctgatgttggaggggaacaactctggattgatgtgctacatgccacacttgaatatggacttgcaccagtttcttggactgattatttgtacttgaccgtgggagggacactttctaatgctggaatcagtggccagagcttccgttatggacctcaaatcagcaacgttcatgaaatggatgtcatcactggtatggagttagttgttttttttaatcaataaatgttaatattattagcttgttagttttttttgaaaaaattgaattaactttcgtttcctcttttctttctttttttaaccacacaattaatctaataactactggtattaagttagtttattttccatttttcatatataagttaggatttctaattaaaattgacatttcgtaccaccactacaaaaaaataatgtatcagtggcacaaaaaaatatattggcatcacttgtttttttagtcattaatattttgtagcatcacaaaaaatatggtgacaagttttctaaaaattacaaattaactgattcgtcagtgatgttaatgattttttagtgcgtcttggcaactaatgttttcatcttatataaaattagaaacaatagcggcaacagcacctgacattgtgtttgtgttttgcgtgtttctatcgcctaatttttgttgagaacgtgttcgtgaaacttggaaaaagagaaaattgaaattttcttgagatatctaccacttaagaaaaacaaatggctgtttccgttttgtctcttatgacatgacatggtacgtcatagatgaagttctgctaaatatatttgatatgatttcttgaacacgttttatatattcccacttcccagttagtgtggttgttgaatctaattaaaacaggaatagtctttgtctacaatatgggtgagcgatgcaaactttccaagggtttagaagttagaactatataggtccacggtcataattttatattcttgattaactttatgttggttaagtcgttcatatttggtcaattcattcatatgagaaaatactgaaatacaaacatggaaaaatgttaattactcttataattggcgcatgcatgcatctaaattatatgattttaataaatagtttttgtcatctacttgatttcaggaaaaggagagttcgtaacatgctcttcacagaagaacttggagttattccacgcggttcttggaggcttgggacaatttggagttatagcaagggcgagaattgctcttgagccagcacccaaaagggtacgtttatagagaattgactagaattttgtcttgtagcttttcctccaccaattcatatagtgacacctaatcgaattgtcatttttttttacggtgaattgtcattttgtaaatctaccaagtggtagttggcacccatatatgtatgaactatagtaccatacatttcattttatgttggtgtgttagtcatccatgatgaacacatacacaaatgaaaataggacgagttatacgtacgtaagggtttgaatcactgaatgtggatttttgaagttgaaagcatattaatcttggtttgaaaaagaaaaaaaaaatcggaagtccctcttgaagttatcatgactcttatattaagccaatagaattagaaaaactataattatgaatgatcatgttaattctttcagtgacttaaaatcttatctacaaaaagtacccttttgaaaaagaccttcacttaagtccatgcatacagtactaatcttacatacttgagagttgagacttgaagcatgaggagatttgaagtctggagaaacaagccaccacatattaattactaccgtattcttatctttatttatccttccaattttgatgggactggttgcacatacattcatacatactaacatacataaatacgtctctctctcatgtatttcattttattatattctatttcgttagtaagtttactagtataagacattattaatggtgaatttttgttggcatgcaggttaagtgggtcagactactttatagtgacttttctgcttttaccaaagaccaggaacgattaatctcaatcaatggaaggaaacaaaagaacgcattggattttctggaagggatgctgctaatgaaccaaggccccataaataattggagatcctctttcttccctctatctgaccatcccagaatagcttctttaataactgaacatagcatcctctactgtcttgaagtggctaaatattatgacgaacaaaccgagttaaatgtggacaaggtaacctcgtctagtcatatctattatatatagttagatcttgtcacatttctttgtttaaaaaataaaataaaaggcacaatcccaaaaagtcaaaagcaaatgcctagatattgtgtgttttcttggatattaattattacaccttaataacccataataatttttttatttttctttgtctctgtaggaaattgaagttttgctccaaggactagcctatatccctggatttaattatgagaaaaatgtctcgtacgttgagttcttgaatagggtccgaagtggagagttgaaacttcagtcacaaggactgtgggaagttcctcacccgtggcttaatttgtttataccaaaatctcaaatcttggattttaattcaggagtattcaaagatatagttcttaaaagaaacatctcctctggaccagtcttggtttatcccatgaatagaaacaagtaagccttgaatgcatgaatcacaatctagtgtcattataattcaggagtgtgtgatgcaatcttttaattttctgaccattcaactcaatatcaattttatttcttttttcaattaaaatgcaaaagagaataataattaataatatgaaatttaattccaggtgggacgataggatgtcagcatctataccagacgaggatgttttctacacagttgggtttttgcactcaagtgggtttgatacttggaaggcatatgatgctcaaaacagagaaattttggagttctgtagagatgctggcatcatggtcaagcaatatcttcccaaccacagcacacaagaagattggacaaaccattttggtgctaaatggatgaaattcttagaaagaaaacatcagtttgatccaagaatgattctatcacctgggcaaaaaatcttccacaaaaaattacagccagtgttttaaatattttccctaataaaaaaagtaaaaatgttttgtggtgggactacctcaattagatggctagctagggacaggtgtacatacagtgtgaccaagaccaagatggcttttgtatgctaaagtttgcattgctagctagagaaattaataaggtggggcattaaaggctgcatgagtacttttggcacctattatgctacatattaccttagatacgttaggttgacaaagtcgtactggtaggtacaagaagcacagttgtctctcacactgtctgtcacccaacttgctatatagtgtgtggagaaattcggatcatattgaagatgctgtgagttatagtcctccaatattaaatgtttaacgattctgtctttctcttatataattttgttttgcattatattactttcgcactggtgcaaacatatatatcaatgattataattaatttatacaatgacgagtataattgtacccaagttgcatgccataatatttgtcaaaaacaaaaagttgtatgccataatcaatccaggttgctagataataagatagatatgaatatgataacataaaatgctattaaagcaacaaataaacaataacacatagtccttatagggttcataattgatcgatgaacctagctagacgttgattttaggttaatttccagcgaggataaaatttattatataaagaaataactaaccaacacaaaataataaaaaattaaaaaaaaacgaagaaacttattttagagatataatttgttttagtatttgattgtaatttgagagattagctaggctctcaccaagtgagatctagagtatattcttaagaaaatatttataataaagaacccttaaacattttgcaaaacaaagggtggaattaatattaacaacaataattataatatcttgaaaattttatgaaaataatatatatatatatatatatatagagagagagagagagagagagagaaaattctcacaaacaatttttatctgttatttcaaattggtgtatgactccttagtccttagttcatttgtttgcacccagtcctgtcttaggtagttgattttatagttaggtaaattaatttctcgcactcttcgcttgattgtcatttatgggttgaactgttgaagtgattttatattttttaataaatttcacctgcaaaaaaactcaccattagcatacgccccccccccccccccccccccctctcccaaaaaaaaaaaaaaaacgaaagaagattaattagaaagaataaggtcgtgaaatgatgttacaaataaggcatatcagaatcagacgcaagggaagaataaaaacgttacaacaattcgcgcacaatgcaccccaaaaaaaaaatgacaggcacacataccttaaggaagaagaatcaacgctttca

SEQ ID NO: 132 - DNA, 7390 bp, Artificial Sequence
  Synthetic polynucleotide
ttaaatcggttcaaaattgttgaatcgatccaaaactagtaaatacagtaggttaattgatttcacttgaaatttaaaaaaaaaaaattaaaatgacgtcattttagtttttttttaaattattataacttatatgacatttttaagtgaagtttactttttattattattaatttatgcatactaggtttctgaaatattatattaaaatattatatatatatatatatatatatatatatatatatatatatatatatatatatatatatatatattattaaaatcaattccacttcgattgagctattaacttttgaaccaatatcttccccagttcaatgaccatccaagtctgaaaacattggttaccatcaacgttacccttccgtgaattggaaaagttaatgcaatataggttgatccaaggataagtcctatggtcccagaaagaaaatcttgagagatccttttgataattacccgagtttttactctctccttttaattcacgaaattggaaacttcaattgctaatataaaaagaattttgttagccaatatcatcagggtattgtcaaagaattacaagaaaaaaaaattataagataacataaaaaaataaaaaacaacataattttatatattttaataaaaaattcttttaatttttttttatcaatattctatagttactggcatttgacatgtaaaaatgtaaacatatgaattgataaaatttgaccaatgtttgaccctgagataggaatccaacggccccagttcaattgcaatcttttatttttactacgtgaaggcccaacaatggagaaccttgtggattttattgctgagaatctgtggttacgatgatgacacaccaacacaatcacagaaagcaagtaccgtttggaaggcctaacacttcattaattgcttcattaaatttattttactttctagctgctcaatttaattgctttacacaaatacttcatgacgtttcagaaggagggccaaatacaatctctacaatggttccatcgtatctttgaatttgacatttagcatccctccctttgcacaatgtacaatttgcattttgaatatttttttctcaccttcatatcgtgggactacttctataaccatcctggtgaaaataaataaagcgagggaattacgtaattaaacatatttaaatttctctctcctctgtttaattaatttatcaaaaacaaatatgtgtgcgagtatttaaaaatgtgtaaagtattattattttttaatttttcttttttccttctcatcaatgataaatatactttttaatataaaaatcaaacaataactataaaaaaaacatcttcacttcaattcaacattaaataaaaaataatccctgctttgttattttttacccaccaattatcatatttgttatttattatttttttatgttcttgctataaaggaaatcactatttgactcacacaaaactataaaggaatcaaataatcaattattatttaaaaactctattaaaataacaattacaacaaaatcccttatttttttcttccttatcattattaaaccttcccattctctctttctatctctacatgtttttctcaaattaaatattttctatatcctcctttatcatgcaaattaaagtcctcttccattctatatatagccgctacctcctccacctcctttccccactacaacacacaaacaccaacaaccaaatcaatccatccaccctagaaacaacaaagcactctctcttctctcattctattatcttctctcatcctcttattctctccaaaccaacaaaaaaaaaatggttgctgagaactacccttctcccacatacttcatcctcaccataacacgtttgatctccacagtgggcaaaacctcccaatggacgaaggccctgtcgctgcctccggaactcgcctccgtctccctcgacgacaccatcttctgcaagctccgtgacgacccagaggccctccagggaagggcctccagggactacgggaacctcgtccgcgaggttcccttggcagtcttccacccagcctcagcgagcgacatcgcgaggctgatcaagctgtcgtacaacggctctgtccccttcaagattgcggcgagggggcaagggcactcgacaaggggccaggcgatggcacgtgagggggtggtggtggacatggcggggttcagagagagagggaatggagtggggataagggttgtgagtagtgtggaccctaataataagaatggttactactattatgcggatgttggaggggaacagttgtggatcgatgtgctacacgccacgctcgagcatggacttgcacctatgtcctggactgattacttgtacttgacgctgggagggactctctccaatgctggcatcagtggccagacattccgctatggtcctcaaatcaccactgtccgggaaatggacgtaatcaccggtaagaaaactttccattcaaccagttaacttacatgtttttagttttttagcttccaatatccaatagtttataacttgtaagcttcaattttatgttaatttataagctagttttaccctacttttgaaaattcaaggattttggtactacaataactcccttgtcaaactcgttcaattgttggcttagtatcaagtagactcttggatttttaggtgtactttaacaaccatgttaatttaattgatcagggttttaatattatggaaattggccattggacaacttggaatggaaggaaagcgggagatggaaagggaaaagaaattaattagaataattgttaatattagttgcgtgaaaaaaattaaatttgctgaattaaattatggttcatcacgactctatttgtggcaacaccaacgtgccgttttcagaacttcattgcaacagcggttatagtggcgtttattcaattcatattttaatgcatcagactgtgattgcgattgaaattttatgaaatcttgttttataaacttgttcttttgattaggaaacttgattctattttatatatatttaatgtaacgccgaattaatggttgataaacgagtctttgtctaaaattttggcgaatgttagcaagcgttttccacgtggtcccgtacgtgtttgaaaaattcttaatcatggaatcagttcacacgggcagtcatagactcatagactccaattcttgattaattgttttcttattaatattggtccatggtcttattttggtcaattctttttattaaaaataaacgggctgctgaattttaatttactcaagtgtttgttaatgaatatgtgtgcatgcatgcaattatatatatatatatatattactattatttatttgtgttttaatcaaattttggtttggttcaggaaagggagaatttgtgacttgctctcagcagacgaattcggagttgtttcacgcggttcttggaggcttaggacaatttggaattataacaagggcaagaattgctcttgcgccagctccgaagagggtacgtttaaaatcttcggaattgactaggacttgtcttgttgcttcttcctccaacatctctcatatagtaacgcaaatttctaaatatgttacattattaattcaaccaccaagctttgcggaagcatcaaatgtcgttgtcctgaaagcttcatgtcatcatttttcttggcacccatatacacacacatacgtttcacattgtgtcagtgcatattagtcatccatgaaagacacatgtacaaatgaaaacgagaggagttatattaaaatgtgtgttggaaaaatatatatcatattttcataagtcttaattttgaaattaatatacagtaaccctttgagaccttagcaattaagccaataaaaaggctcgtattaaccccaaccaacaactattagaaaatactaacaagtataggtgtatacataaatgattcatttgaattttagtaccttaattatttaactttatccttctatttgacgggactcgttgcataagccatacatacataatcatgcgttcattattgtttttcattatgagttaatgagttgattgtatgaactaatggtgaatttttgttggcaggttaaatgggtgagacttttgtacaatgacttttctgcttttaccaaagaccaggaacaactaatatctatcactggaaggaaacaaaatgtttcactggattatttggaaggattgctgctaatgcaccaaggacccataaataattggagatcttctttcttccctttagccgaccatgcccgaataatttcgctagtaactaaacacagcgtcctctattgcctagaagttgccaaatattatgatggccaaaatgaaaacaatgtggacaaggtaccatctccattcatgtgcatttgccttgatgatgtttcttctattttttcttttaatgttttgatctcaccttatataataaccctttatcacactcaatcttgttatatttttaagagtttaatgataatattatgattttgttgtgaaaaaagagagtttaattgttattatataatcacaaattatcattaatatgacttttaaaataattaataatataaaaattaataaatttatcgtatttaatgagttataattaaatgatcatataaaattattttatattattaacatatagtttttttttctatttttaatatttgttttactataagttgttatattttcaatcttttttctagtataagttttaataatcaatattgtaagtaatattctcatttttcatgttgtgtaggaactccaagttttactacaaggattgagctatatccctggattttactatgaaaaagatgtctcatattttgagttcttgaatagagtccgaagtggagagttgaagctacagtcacaaggactatgggatgttcctcacccgtggcttaatttgtttataccgaaatctcaaatcatggaatttgactcgggcgtgttcaagaatatcatccttaaacgaaacatcaccacaggacctgtcttggtttaccccatgaatagaaacaagtaattgagcttaactaactaatctcaacttatgttgttatcattaggaaaaatgttaattggtacgaaaactatatataccactattttcatttaaattcatgaaagtgaaatttctctttcctaaaacaaattctttctcttaaaatgaatttttgtttttctcaatctccatcaattacttatttccttttttgaatgtttgaaaagtcattcacaacattttcttcataaaagggttattcgtaccaatttaaatagaattgccgttattatcagatgtacaattcttctcttcactcacttcttttccattaaaattgtaaaaaaaaaataaaaaaatcaggtgggacaataggatgtcagcatcaatacccgatgaggatatcttctacacagttggatttttgcattcaagtgggtttgataattggaaggcctatgatgctcaaaataaagaaattctacaattttgtaacgttgctgggatcaaggttaagcaatatcttccccactatcgcacacaagaagattgggcaaaccattttggccctaaatggaggacttttgtagaaagaaaacaccagtttgatccaagaatgattctatcacctggacaaagaatctttaacaattaaaatagctttaaaaatatatattcccccccccccccccccccccaaaaaaaaaaaaattatataatatggtgggactacccaagttagctagctggctgatcacaagtgtgcacataggacccagaattcagatgatagcctttgtacttgtttttgttaagagggtggggttaaaagctgcatgactttggcatatatgtagatcaggttacacatactttagatacgttaggttgacaaaatcatgtgtgaaataagatgcacacagctagctgtgtacctttctttctctctgtccctcaatttgtctatcactaaaaagatttctatatagtttagaacctagtgaagagaaagaaaaaaccattatattgaggatttaattttatcacgttctaatcctatacattaatattcttaaatgtgcaatgagtgtgctcggtgccttaatgattctttatctttgttaattgttatattgtagggttttgtttttgccttcctaattttgtaacaggggcacccctagcaataattgagatcctaggttaactaaggaacagcattattgtgtctaaattgagattcctagctgtatgccataataataaatcatcgtaggttgctagatagatgtgatagcgccaaatgccttccaatactataatctccattgcaagatccttcgttgtgattgtgtagaaaagattacgctgctttacaagagaatactccaagaaagcaagtgattgctccttaatataaagaatcatgcaataaacaaatggtgtcgtaatccataaagtgtatttaatatttgatgaaagagtagtgtagacatcaaacaaaataaagtttgatgcaattcgaattatagatacttgattaatctctaaattatgttgagacaatcatatttgaatttgataagactattatgaacgataaaaaatattataaataataaaaaaatttcatcaaacatttaatacaattatataccttactcaaatttgaaaacctgtacatataggaaaaaaacctttactaaaagaggttaaactcaccatacggatttttatatgtcgaagggatctttaattgtccatcggaaaacatcctaattcataaaaaaggaaagaaagtttagacatgaataattacggaccaatgaatgcaacctacgtctctcaattttaaggagaatttaggaatattatagtatatcactgaaagtacacacaagtggcaatgatgaatattttaatttaaagttttaattggattcgaaattaatcccttcttttttccagaaaaaataataatcatcgagtaatcaagacaatttcccaagtagacaacaagaatacaaaagagaatacgtgacttcgtttcaccatagaaaagaaggaatgcaataacgatgataataattataaaatgaaattgacaaaatatctaaatgcctgtagatatttctacagcgaatgataagtgtttttccattaaaaataagtttcttttgttaagaatttctaacatttttagttccaaaatataggaatgaagccaataagtaagtaagaatttctaacgtctgaaag

SEQ ID NO: 133 - DNA, 7388 bp, Artificial Sequence
  Synthetic polynucleotide
ttaaatcggttcaaaattgttgaatcgatccaaaactagtaaatacagtaggttaattgatttcacttgaaatttaaaaaaaaaaaattaaaatgacgtcattttagtttttttttaaattattataacttatatgacatttttaagtgaagtttactttttattattattaatttatgcatactaggtttctgaaatattatattaaaatattatatatatatatatatatatatatatatatatatatatatatatatatatatatatatatatattattaaaatcaattccacttcgattgagctattaacttttgaaccaatatcttccccagttcaatgaccatccaagtctgaaaacattggttaccatcaacgttacccttccgtgaattggaaaagttaatgcaatataggttgatccaaggataagtcctatggtcccagaaagaaaatcttgagagatccttttgataattacccgagtttttactctctccttttaattcacgaaattggaaacttcaattgctaatataaaaagaattttgttagccaatatcatcagggtattgtcaaagaattacaagaaaaaaaaattataagataacataaaaaaataaaaaacaacataattttatatattttaataaaaaattcttttaatttttttttatcaatattctatagttactggcatttgacatgtaaaaatgtaaacatatgaattgataaaatttgaccaatgtttgaccctgagataggaatccaacggccccagttcaattgcaatcttttatttttactacgtgaaggcccaacaatggagaaccttgtggattttattgctgagaatctgtggttacgatgatgacacaccaacacaatcacagaaagcaagtaccgtttggaaggcctaacacttcattaattgcttcattaaatttattttactttctagctgctcaatttaattgctttacacaaatacttcatgacgtttcagaaggagggccaaatacaatctctacaatggttccatcgtatctttgaatttgacatttagcatccctccctttgcacaatgtacaatttgcattttgaatatttttttctcaccttcatatcgtgggactacttctataaccatcctggtgaaaataaataaagcgagggaattacgtaattaaacatatttaaatttctctctcctctgtttaattaatttatcaaaaacaaatatgtgtgcgagtatttaaaaatgtgtaaagtattattattttttaatttttcttttttccttctcatcaatgataaatatactttttaatataaaaatcaaacaataactataaaaaaaacatcttcacttcaattcaacattaaataaaaaataatccctgctttgttattttttacccaccaattatcatatttgttatttattatttttttatgttcttgctataaaggaaatcactatttgactcacacaaaactataaaggaatcaaataatcaattattatttaaaaactctattaaaataacaattacaacaaaatcccttatttttttcttccttatcattattaaaccttcccattctctctttctatctctacatgtttttctcaaattaaatattttctatatcctcctttatcatgcaaattaaagtcctcttccattctatatatagccgctacctcctccacctcctttccccactacaacacacaaacaccaacaaccaaatcaatccatccaccctagaaacaacaaagcactctctcttctctcattctattatcttctctcatcctcttattctctccaaaccaacaaaaaaaaaatggttgctgagaactacccttctcccacatacttcatccaccataacacgtttgatctccacagtgggcaaaacctcccaatggacgaaggccctgtcgctgcctccggaactcgcctccgtctccctcgacgacaccatcttctgcaagctccgtgacgacccagaggccctccagggaagggcctccagggactacgggaacctcgtccgcgaggttcccttggcagtcttccacccagcctcagcgagcgacatcgcgaggctgatcaagctgtcgtacaacggctctgtccccttcaagattgcggcgagggggcaagggcactcgacaaggggccaggcgatggcacgtgagggggtggtggtggacatggcggggttcagagagagagggaatggagtggggataagggttgtgagtagtgtggaccctaataataagaatggttactactattatgcggatgttggaggggaacagttgtggatcgatgtgctacacgccacgctcgagcatggacttgcacctatgtcctggactgattacttgtacttgacgctgggagggactctctccaatgctggcatcagtggccagacattccgctatggtcctcaaatcaccactgtccgggaaatggacgtaatcaccggtaagaaaactttccattcaaccagttaacttacatgtttttagttttttagcttccaatatccaatagtttataacttgtaagcttcaattttatgttaatttataagctagttttaccctacttttgaaaattcaaggattttggtactacaataactcccttgtcaaactcgttcaattgttggcttagtatcaagtagactcttggatttttaggtgtactttaacaaccatgttaatttaattgatcagggttttaatattatggaaattggccattggacaacttggaatggaaggaaagcgggagatggaaagggaaaagaaattaattagaataattgttaatattagttgcgtgaaaaaaattaaatttgctgaattaaattatggttcatcacgactctatttgtggcaacaccaacgtgccgttttcagaacttcattgcaacagcggttatagtggcgtttattcaattcatattttaatgcatcagactgtgattgcgattgaaattttatgaaatcttgttttataaacttgttcttttgattaggaaacttgattctattttatatatatttaatgtaacgccgaattaatggttgataaacgagtctttgtctaaaattttggcgaatgttagcaagcgttttccacgtggtcccgtacgtgtttgaaaaattcttaatcatggaatcagttcacacgggcagtcatagactcatagactccaattcttgattaattgttttcttattaatattggtccatggtcttattttggtcaattctttttattaaaaataaacgggctgctgaattttaatttactcaagtgtttgttaatgaatatgtgtgcatgcatgcaattatatatatatatatatattactattatttatttgtgttttaatcaaattttggtttggttcaggaaagggagaatttgtgacttgctctcagcagacgaattcggagttgtttcacgcggttcttggaggcttaggacaatttggaattataacaagggcaagaattgctcttgcgccagctccgaagagggtacgtttaaaatcttcggaattgactaggacttgtcttgttgcttcttcctccaacatctctcatatagtaacgcaaatttctaaatatgttacattattaattcaaccaccaagctttgcggaagcatcaaatgtcgttgtcctgaaagcttcatgtcatcatttttcttggcacccatatacacacacatacgtttcacattgtgtcagtgcatattagtcatccatgaaagacacatgtacaaatgaaaacgagaggagttatattaaaatgtgtgttggaaaaatatatatcatattttcataagtcttaattttgaaattaatatacagtaaccctttgagaccttagcaattaagccaataaaaaggctcgtattaaccccaaccaacaactattagaaaatactaacaagtataggtgtatacataaatgattcatttgaattttagtaccttaattatttaactttatccttctatttgacgggactcgttgcataagccatacatacataatcatgcgttcattattgtttttcattatgagttaatgagttgattgtatgaactaatggtgaatttttgttggcaggttaaatgggtgagacttttgtacaatgacttttctgcttttaccaaagaccaggaacaactaatatctatcactggaaggaaacaaaatgtttcactggattatttggaaggattgctgctaatgcaccaaggacccataaataattggagatcttctttcttccctttagccgaccatgcccgaataatttcgctagtaactaaacacagcgtcctctattgcctagaagttgccaaatattatgatggccaaaatgaaaacaatgtggacaaggtaccatctccattcatgtgcatttgccttgatgatgtttcttctattttttcttttaatgttttgatctcaccttatataataaccctttatcacactcaatcttgttatatttttaagagtttaatgataatattatgattttgttgtgaaaaaagagagtttaattgttattatataatcacaaattatcattaatatgacttttaaaataattaataatataaaaattaataaatttatcgtatttaatgagttataattaaatgatcatataaaattattttatattattaacatatagtttttttttctatttttaatatttgttttactataagttgttatattttcaatcttttttctagtataagttttaataatcaatattgtaagtaatattctcatttttcatgttgtgtaggaactccaagttttactacaaggattgagctatatccctggattttactatgaaaaagatgtctcatattttgagttcttgaatagagtccgaagtggagagttgaagctacagtcacaaggactatgggatgttcctcacccgtggcttaatttgtttataccgaaatctcaaatcatggaatttgactcgggcgtgttcaagaatatcatccttaaacgaaacatcaccacaggacctgtcttggtttaccccatgaatagaaacaagtaattgagcttaactaactaatctcaacttatgttgttatcattaggaaaaatgttaattggtacgaaaactatatataccactattttcatttaaattcatgaaagtgaaatttctctttcctaaaacaaattctttctcttaaaatgaatttttgtttttctcaatctccatcaattacttatttccttttttgaatgtttgaaaagtcattcacaacattttcttcataaaagggttattcgtaccaatttaaatagaattgccgttattatcagatgtacaattcttctcttcactcacttcttttccattaaaattgtaaaaaaaaaataaaaaaatcaggtgggacaataggatgtcagcatcaatacccgatgaggatatcttctacacagttggatttttgcattcaagtgggtttgataattggaaggcctatgatgctcaaaataaagaaattctacaattttgtaacgttgctgggatcaaggttaagcaatatcttccccactatcgcacacaagaagattgggcaaaccattttggccctaaatggaggacttttgtagaaagaaaacaccagtttgatccaagaatgattctatcacctggacaaagaatctttaacaattaaaatagctttaaaaatatatattcccccccccccccccccccccaaaaaaaaaaaaattatataatatggtgggactacccaagttagctagctggctgatcacaagtgtgcacataggacccagaattcagatgatagcctttgtacttgtttttgttaagagggtggggttaaaagctgcatgactttggcatatatgtagatcaggttacacatactttagatacgttaggttgacaaaatcatgtgtgaaataagatgcacacagctagctgtgtacctttctttctctctgtccctcaatttgtctatcactaaaaagatttctatatagtttagaacctagtgaagagaaagaaaaaaccattatattgaggatttaattttatcacgttctaatcctatacattaatattcttaaatgtgcaatgagtgtgctcggtgccttaatgattctttatctttgttaattgttatattgtagggttttgtttttgccttcctaattttgtaacaggggcacccctagcaataattgagatcctaggttaactaaggaacagcattattgtgtctaaattgagattcctagctgtatgccataataataaatcatcgtaggttgctagatagatgtgatagcgccaaatgccttccaatactataatctccattgcaagatccttcgttgtgattgtgtagaaaagattacgctgctttacaagagaatactccaagaaagcaagtgattgctccttaatataaagaatcatgcaataaacaaatggtgtcgtaatccataaagtgtatttaatatttgatgaaagagtagtgtagacatcaaacaaaataaagtttgatgcaattcgaattatagatacttgattaatctctaaattatgttgagacaatcatatttgaatttgataagactattatgaacgataaaaaatattataaataataaaaaaatttcatcaaacatttaatacaattatataccttactcaaatttgaaaacctgtacatataggaaaaaaacctttactaaaagaggttaaactcaccatacggatttttatatgtcgaagggatctttaattgtccatcggaaaacatcctaattcataaaaaaggaaagaaagtttagacatgaataattacggaccaatgaatgcaacctacgtctctcaattttaaggagaatttaggaatattatagtatatcactgaaagtacacacaagtggcaatgatgaatattttaatttaaagttttaattggattcgaaattaatcccttcttttttccagaaaaaataataatcatcgagtaatcaagacaatttcccaagtagacaacaagaatacaaaagagaatacgtgacttcgtttcaccatagaaaagaaggaatgcaataacgatgataataattataaaatgaaattgacaaaatatctaaatgcctgtagatatttctacagcgaatgataagtgtttttccattaaaaataagtttcttttgttaagaatttctaacatttttagttccaaaatataggaatgaagccaataagtaagtaagaatttctaacgtctgaaag

SEQ ID NO: 134 - DNA, 3653 bp, Artificial Sequence
  Synthetic polynucleotide
cttctcatccaatctaatagcaggatacgcgatgtttacattccgacaatagtggactcagtaccaacaccataaaaaaaaataaacaactagttatgtgtccataggggcaaaagaaaaagaaatacgcactactgtggaaagaagaaaaaaagcaataaggacttatttctatatccggaaaaagcatatatccttaaattggttaatgaacaaaaacttgaaacatgtctttccttcatgtttttgttgtaacttataacataacatgtaattgtttgtggttaccactgtttggaaaaagttgaagatttgtgagatctctcattgatgttacttttcctcttcaacttggcttctgtgtcactgtacatgtgatgcctttggcgtctctcttccttccaagtaagcagtccacatacgcattctcctcgtatcgtatgtcataagtcatgactgatcaacaatgctacgttgaccaagccaccacccacaaactcctttaaattctggcccaaacccttaagttcctgcattctccaatccatcactttctccttttcctcgtgttcacaaaatcacgctgcttaattattccttcaactaccatcatatcataccttctcaacagaaaaataaaaataaaaatgagatacatccttggagaacacaacattctgttcctcaaaagcttcgccttcacgatattattccttagttgcatagccattcggcttaacttgtgtctttccagcatcccttcttcactgaaatcaattcccgcatttaaaatttgatcaagttagcctaagccatgcagcaagggactttggcaacaggtaccaatataatccaatggcagtgctgcaaccagaatcagtttctgatattgtagccaccataaggcatatctggctgatgggtcctggctcccacctcaccattgcagcgaggggccacggccactcgctgcagggtcaggctcaagcccatggaggacttgtgatcaacatggaatcactcaaggtcccagaaatgcaggtatatcgctaaatattaattgttaatcgttaattttttgttagctaggcaatcaaatccacaatcttttcctctcttccttcttcttatacaaccaaactaaccttataactccaatgcagatacatgttgatgagggaaacaagtctcctccatacgtggatgtctcaggtggcgagttgtggataaacatattgcatgagactctaagatacggcttggcgccaagatcgtggacagactacctgcatctcacagttggtggcactctctccaacgctggtgtcagtggtcagacatttaggcatggtccccagataagtaatgtacagcagctcgagattgttacaggtttgtgaaaaagagaatgaataataattgtttgtcttttctgaataataattcatttgatactggctgcatataagttttctaataaataatttttttcccctactttgatgagtaaaacatggtcaatgaatggatgcaggaacaggggaggtgttgaactgttccgcggagaataatggggatctctttcatggtgttctagggggcttggccaatttggcattataacccgggcaagaattgtcctagaaccagcacctaccatggtaatgcatcactcatcagtgactataccaaaacaagcttctttttttttggttttaatgtgtgctttgggtcatgactgaaaattttctatttattggaacaggtaaaatggattagagtgctgtactcagatttcacagcattcacaagagaccaagagaggttaatatctgcagaaaagacttttgactacattgaaggatttgtgataataaacagaactggtcttctaaataactggcgattatccttcaacccacgagacccggtccaagctagtcatttcaagtcggatggaagaactctcttctgccttgaaatggccaaatacttaaacgtggaagaaatcgatgcagcaaatcaggtgaggccagcaacactcaatctaatagatttttttgaaaataaagggataattaactccaaggttttaaaatatgagaccgtgggttgcaacatcaaagttttctaactctttgcgacccgaattgagactatgtcgatagcatttgtctatgatttgcccgtgatatcaacaaacacgaccaaaccacatgcgactgcgacctatatttaaaaccttgattaactcattagtgataatctttctttaggaaagaaaataaaagaggctaaatcaaccgtatctcacttttgtgtgtgcaggaagttgaggaacatttgtcccgtttaagctacatcccatcaactcttttttcaacagaagtcacatttgtagatttcttagacagggtgcacatatccgaggtcaagttgcgttcaaaaggcttgtgggatgttccacatccatggctcaatcttctaatacccaaaagccaaatactcaactttgcacaagtcgtcttcgggaacatcctatcagaaactagcaacggccccgtccttatctacccagtaaacaaatcaaagtaatgaatggttcagaaaaaaacatactattaactctagaaacaaatattttagccgtcaatattttttaattgacatgttttgttttgtttgcaggtgggacaacagaacttctgttgtgattccagaggaagatattttctacttagtggcatttcttacatctgcagttccatcttcaaatggaactgatggcctagaacacatactaagtcagaacaaaagaatattagaattctgtgaaagagcacaacttggagtgaagcagtatttgccccactacaacacacagcaagaatggagggcccattttggtcctcaatgggagacttttctgctgagaaagtccgtttatgatccattagcaatactcgcccctggccaacgtatatttcaaaaagcaataaccttctcatgaccacatttttattattaattattaaaaatctgaaaaaaaaaaagagaagaaaagtccttcatggcatgtgccaaaatgaaaaaaaaatgttatatgatccagacaggttttgacattgaccatacagaatgcaattgcaaaggaagaaggttcattgatagtagagaaaaagagggagaaaaagagattacaaaatgatgactggtgagatttgtatgccttgcaggttaatgaggaaagttgtcagtgtatgtaggtatgtaccattactgatggaaaaattgccttacgtgctgagtgtagcaccaaggcagcagggtccggctgagattagatcaacaaaacacattaatcattgtagggtttccaaagaacttataaatattatcagcgctagagccaatgtatagtactatcaattttgtaaacactcccttatttgttctctgtctcacatgtatccaaattcattaagattataattaaatacagatatttatgcatccaccacaaaaagatatcaatacgttcgcaacaaatacagataagatgatatataatgctgagtaacaaatactactattctagaaaattgcggaaaatgatataaaaatgggtatgcctaccctgaaggatgatgaat

SEQ ID NO: 135 - DNA, 3644 bp, Artificial Sequence
  Synthetic polynucleotide
cttctcatccaatctaatagcaggatacgcgatgtttacattccgacaatagtggactcagtaccaacaccataaaaaaaaataaacaactagttatgtgtccataggggcaaaagaaaaagaaatacgcactactgtggaaagaagaaaaaaagcaataaggacttatttctatatccggaaaaagcatatatccttaaattggttaatgaacaaaaacttgaaacatgtctttccttcatgtttttgttgtaacttataacataacatgtaattgtttgtggttaccactgtttggaaaaagttgaagatttgtgagatctctcattgatgttacttttcctcttcaacttggcttctgtgtcactgtacatgtgatgcctttggcgtctctcttccttccaagtaagcagtccacatacgcattctcctcgtatcgtatgtcataagtcatgactgatcaacaatgctacgttgaccaagccaccacccacaaactcctttaaattctggcccaaacccttaagttcctgcattctccaatccatcactttctccttttcctcgtgttcacaaaatcacgctgcttaattattccttcaactaccatcatatcataccttctcaacagaaaaataaaaataaaaatgagatacatccttggagaacacaacattctgttcctcaaaagcttcgcctttattccttagttgcatagccattcggcttaacttgtgtctttccagcatcccttcttcactgaaatcaattcggcatttaaaatttgatcaagttagcctaagccatgcagcaagggactttggcaacaggtaccaatataatccaatggcagtgctgcaaccagaatcagtttctgatattgtagccaccataaggcatatctggctgatgggtcctggctcccacctcaccattgcagcgaggggccacggccactcgctgcagggtcaggctcaagcccatggaggacttgtgatcaacatggaatcactcaaggtcccagaaatgcaggtatatcgctaaatattaattgttaatcgttaattttttgttagctaggcaatcaaatccacaatcttttcctctcttccttcttcttatacaaccaaactaaccttataactccaatgcagatacatgttgatgagggaaacaagtctcctccatacgtggatgtctcaggtggcgagttgtggataaacatattgcatgagactctaagatacggcttggcgccaagatcgtggacagactacctgcatctcacagttggtggcactctctccaacgctggtgtcagtggtcagacatttaggcatggtccccagataagtaatgtacagcagctcgagattgttacaggtttgtgaaaaagagaatgaataataattgtttgtcttttctgaataataattcatttgatactggctgcatataagttttctaataaataatttttttcccctactttgatgagtaaaacatggtcaatgaatggatgcaggaacaggggaggtgttgaactgttccgcggagaataatggggatctctttcatggtgttctagggggcttggccaatttggcattataacccgggcaagaattgtcctagaaccagcacctaccatggtaatgcatcactcatcagtgactataccaaaacaagcttctttttttttggttttaatgtgtgctttgggtcatgactgaaaattttctatttattggaacaggtaaaatggattagagtgctgtactcagatttcacagcattcacaagagaccaagagaggttaatatctgcagaaaagacttttgactacattgaaggatttgtgataataaacagaactggtcttctaaataactggcgattatccttcaacccacgagacccggtccaagctagtcatttcaagtcggatggaagaactctcttctgccttgaaatggccaaatacttaaacgtggaagaaatcgatgcagcaaatcaggtgaggccagcaacactcaatctaatagatttttttgaaaataaagggataattaactccaaggttttaaaatatgagaccgtgggttgcaacatcaaagttttctaactctttgcgacccgaattgagactatgtcgatagcatttgtctatgatttgcccgtgatatcaacaaacacgaccaaaccacatgcgactgcgacctatatttaaaaccttgattaactcattagtgataatctttctttaggaaagaaaataaaagaggctaaatcaaccgtatctcacttttgtgtgtgcaggaagttgaggaacatttgtcccgtttaagctacatcccatcaactcttttttcaacagaagtcacatttgtagatttcttagacagggtgcacatatccgaggtcaagttgcgttcaaaaggcttgtgggatgttccacatccatggctcaatcttctaatacccaaaagccaaatactcaactttgcacaagtcgtcttcgggaacatcctatcagaaactagcaacggccccgtccttatctacccagtaaacaaatcaaagtaatgaatggttcagaaaaaaacatactattaactctagaaacaaatattttagccgtcaatattttttaattgacatgttttgttttgtttgcaggtgggacaacagaacttctgttgtgattccagaggaagatattttctacttagtggcatttcttacatctgcagttccatcttcaaatggaactgatggcctagaacacatactaagtcagaacaaaagaatattagaattctgtgaaagagcacaacttggagtgaagcagtatttgccccactacaacacacagcaagaatggagggcccattttggtcctcaatgggagacttttctgctgagaaagtccgtttatgatccattagcaatactcgcccctggccaacgtatatttcaaaaagcaataaccttctcatgaccacatttttattattaattattaaaaatctgaaaaaaaaaaagagaagaaaagtccttcatggcatgtgccaaaatgaaaaaaaaatgttatatgatccagacaggttttgacattgaccatacagaatgcaattgcaaaggaagaaggttcattgatagtagagaaaaagagggagaaaaagagattacaaaatgatgactggtgagatttgtatgccttgcaggttaatgaggaaagttgtcagtgtatgtaggtatgtaccattactgatggaaaaattgccttacgtgctgagtgtagcaccaaggcagcagggtccggctgagattagatcaacaaaacacattaatcattgtagggtttccaaagaacttataaatattatcagcgctagagccaatgtatagtactatcaattttgtaaacactcccttatttgttctctgtctcacatgtatccaaattcattaagattataattaaatacagatatttatgcatccaccacaaaaagatatcaatacgttcgcaacaaatacagataagatgatatataatgctgagtaacaaatactactattctagaaaattgcggaaaatgatataaaaatgggtatgcctaccctgaaggatgatgaat

SEQ ID NO: 136 - DNA, 8146 bp, Artificial Sequence
  Synthetic polynucleotide
ctacttctagaatgacaactactcctatggcaatatcaattgttagcggtggttcccttaagttcgagactaagggcagtctccaaaaggaagaaaggaaataacaaacttaagcctgaatgttctacgttttatttagtgtctcttgatatttaaaggtctatcaaatatgtataataaccgcacttccactataataaccacactcccactacgataatcgctacaataaccaccacaataactacttctaggatgacaactacctctatataagtttccatgacagaacatcttcttcctaacaccttacctatcacaaatgcttctcctctcggtgtcagagagtactattgattccctaagttctgacggtgtctttttctaaccaaagatccacttttcgaaggtcccgagccaattcgatgagagctcggaggcatagaactcggtttagtcacttatgccatgcttcatttcgtcgcgcgtactttaccaatcaacacacgccatcgagattgatctgcaagtgcagattacgtaagcgagaaaggatttgcaatggaattcacaaatcgcacaatcagagaacaggataagtgtactgctaattatgagcgccagggagtgtagattcatgtcttaggttttaaaattagaacagaataaatatgaaaattgttttttactttctatattttatattttaatttttttttagtttttattattagtaatattgttaattataattaattataaaaattttaacaagtaatttattactaatttatcataagataatttataataaaaaaataattgataatttataattaatttataactaattatttttatattttgtttagtaaagactaaaaggtaattaaaatgtaaattatagagattaaaatatcatttttaaactataagaactaaaaaagaattaaaatacaaactataagacaaaaaagatcacttttaaactataggaactaaaaaaattacttttaaattatatggactaaaaaataccaatcgtaaaattataggaactaaataaataatataaccttaaattttttattttaagatcaattttttaaaaaattaatgttaatcatgatattttatttataaaatatcaaaactcattttgtaaaatggattttcatcaaaataaacgttcactttgctatggtaaatcttgttttgtagtattttggttgttctgacccaaatgacccaaatgcaggctagtggacaatgacattgattgttttgtatatgggttgggtgtcccttgtatcctattgatatattccttttgccttattaagaaaaattgcattagaaactactatatattaaatgctctaacaattaatgattaaattgacaccacatcctgtttgactctccacttttcttttattggtactctctattttagtctgctctttatatacatgttaacttaaagacagcaaatttaccaaagtaacttatcttctctcttgaaagaaaaatgccacagaggaatttagtactattttccacaactatggttgtgccacatagttcacaaaaccccagtggcaattttcaatccatcttctgttagtgacatcttggccttgatacatttctcaaactctcttcctaacccattccccatagcccctagagggaaagcacactctgttcatggacaagccatgacaaaagatggggtggtgttgaatatgactaacctcaatagcagttttcaaaatgggttaggggttttggtgtctgcttgtgatggaaaaggtccattgatttgttatgctgatgtaggtggtggccaaatgtggatcgatgtcttgcatgcatcccttgaacgtggactcacacctttgtctttgactgattatatgtatgccactgttgggggcacactatctaatgctggcatgggtggcatgtcctttcgatttggacctcagatctctaatgttcttgaattggatgttattacaggtatgactcactcaattttatcaattaattttcttccatactcatctacacgcttgttcgaagtgaaacatttaactgaattttttttatcttggatatcacaattgtgtaatttttcgtctagatttgtgattatgttaattcaatctgtatatcttaataattatattaaagtccctccctccttcaattatctgtcaaatatttaacgaaatatatttatgtgacatttgagaatgttgatgggtttatatgtgttattttagtcgattagattttacgtgtgaagttttagtgtctcccaaattcttattaacattgtgggaaaaaatgagaaaacaatcgcagaactggagtttgattccagattattattattatttagtaattttattattatctatatcataatagtatatttattaactcatttaatatcatatttattacatatatttagtgtaataatagtatatttattacattctttttacatacaaaaagtcagaaagacttaaaagcttctacaaaaagaaatacctgttatatcagctcttaaagaattacatatgaaatcctacgcatttattacacacacacaaatatatatatatatatatacttaaacagaaatatgaattgttattatatttataattagtatttatattaatagaacaatttatagtttatactatggaataaatttttaaatataaatttattatttatattgatatactcatttatagtttttactaagatataagtttataaatataaatttgcacctcttgtgattttgaactggttttttaataaataaaaaataaataaaaagattataaatataaattattattacattaacataataatttacatttattaatttaatactaaatatatatagtaaatgtatcattaaatgaatgtagtaaacatattattaattttcagaaaagttttaatactttttcaccctagaaatatacaaattttttttaattgatataatttttttttgtttatgattcttgtattaatatttaaaccttccgttggagattaacgggtaaaaaatacaaggtttaaacattatataagtaaagttttcttacaacgacaaaacaaaactaattaatatatttacagctaatgatgtttgtttaaaaagtgctaattatatttttttgttctagtcaatgttgtatagttacccaacatataatcagtgacggactttttagttgtggggaaatattcattatatatatatatatatatatgaatcggtgctgcatataatacaatatatacaattttacactgaaaactgtatattattaaaatttatcaggaattatgcttaaatatcttattgtatctatcttattaaagaaatctaattatatctataaaataaaggtttatttcgatcgttttgatatattgtaaatattattttttttgtttgtttttctcgtataaactttaatacatctatatatgtggcttttatatatagggaaaggagaccttgtgacttgctccaaggagcagaactcagaggcattttacgctgctcttggaggattaggtcaatttggggtgataacaagagcaagaatacctctaggacctgcacctactagggcaagtattagtttcccctttcatatagatttcgtaagggtgaaaataaaaataatattttataggactaaaattaaactaatttcatataaacctaaattaaaactcactcaaattatagatgtattaaaatcatatttaatctatatatatgccatttaattttaattgaaacatacatattatatatagatcattttttcctgtaaacttagtcttagacactatacaacttcaatactattaaaattgtaccaaaattaactatcttaaaactaaaaatgagaataagtcgggtaattgacataagtctatgagctcacttgtttaaagcttggtctcatctatctaataaaaaaagttaaacttaaactttttaaaaagtctatttatttatataatttagacttggacttgtgaaaaaacttattaaactgtatagaccggtctaattattcatttaaatatagtaaaacattaaaatatattatacttttattttaatatcttaatatgttaatatatttttatcataaataaaatgaatatttgaaataaatagatctttaaatatgtaataagctaaactatatcatatcttaatttttataacatgccatacctatatatttatataacgtctaacttgacctaacatattatcacccctacttaaaaattatttatctatttatttttaacaaagtttttttcatgtgggtgtttgcaggtaaaatggctccgcctgctatacaacaacttcactgcattttcaagagaccaagaacatttaatatcgttcagtgaaaggaatgacattgctacagcagattatgtagaaggcatgcttctattgaatcagccgccactggatcttctcttttatccagcttctgatcatcaaagggtaacttccttggtaactcaatatggcattatctacatcttggagcttgccaaatactattacaataactctcaggcacatgtcaatgaggtaacttgaaataaaagttgtttttagcatctagttagaaacttcttttatttttattcttatttttttatggacaacatatataatgaatttagtaaagaaatacagagatattctaattgttatatattcatcatacatcaaagatcaaattaatcctcctgattgaaaagaattttgttttcatgaatccaaaagaaacatgtctcaaactcactcaaattgtatggaacccatatattaattaatttatgtacaattcattgttttttactaaattgattatttttcttgtttcttaaataggaagttgcatatttgctgaaagggttaaactttgtacatacatttgtgttcgaaagagatgtgtcatacgaggagtttgtgaacagagtttatcctttggagcaaatgcttaggtcagaaggactttgggaagttcctcacccttggctgaacctctgggttccaagatctagaatctcagattttgatgaaggtgttttcaaggacattgttcttaagcaaaatattactggcggaagttttctagtctacccaacaaacagaagaaacaagtaaattgattagattatttatttttttgtgagtgtcaaattattatctagatcacccgtctcctttaatttacatatcctttctagtgtttccaatatataaaaaaatgacacctcactaaaaaaaataacaaataagagaatttattgttttttaaccacatttttttattgagagaaaacactccacaagaaaaataataataacaacaaaataatttatgtaatttttaaaagaaaaggtcacttaaatttttgcaactctaaaattagttattgaaaaaaaaaacctcaagtctcacatttactagaggaacctcctaagttttttctaaaatgaatatatttctaaaggatatgagacttaaagttttttcaatattaatttacaacattgtgctctgattcaaagtcaagcaatctcctagaataaaagagattgaaaatagcactaacactattggtggggtttgtggtttgtggtctgtggatttaaatttggcatgtggtatttaacagaacttcaacagaggtataaattataaaagatttttttttctgagaaaaagaaataaatggaggtatgttattaaaagagggagtatgaataacaactgtcctaataatactccattgggcctgacagtaggagttgggccataacaattagggacaaaaaataattttggttactaaatttagtcaataattccttttcttagtcacattagatgtttctgttccaatttatttgcttatgtaaatgacttaatttatacatatgtgaggattaaattgaatcaacattatgcttcacaggtgggatgataggatgacaccaattacacctgacgaagatgttttctacgttgtagattttttgcgtgttgctaaaacgtttgatgtggtggacaaactacaggttcaaaacaaacagatactgcggttttgtaatgatgctggtattaagatcacagagtatcttatcgggaacaaaactcatcaacaatgggtggaacactttggcccaaaatggaaactttttgcagatagaaaaactgaatttgatcccaaaaaaatattgtcacctggacatgggattttccagtaaataatgtgctaggtttcagtgaaatctctcattttggaaattcatgaaataaaaatgaaattctgtaccagaaaaaaaaaaaaaaacttgttgtgtaattctgtgccaaacatacattgaattggattgaagttattatgcaattttgtacgaaaaaaaacttatgtatttgattattttatgtttttttattaatgttgaatgttcaaatattctcatgactcacgaacaacggcagatctagaagaaaaaaatggtcgtaagatgtgttgatggtatttaaatgaatgcatgtctacttcaaaatttatttgatagactcatttcgtaaaaaaaaaaaatagaaataacctatttaacaatacttgtttggaaaataaatttaaaaataagaaatttggtcgtttttttatatagaaaatagcattgtttttatgatattttaatgcaattcacgattttatgttgttgggtttttaaataaataaaagttacataaaactttagttttaaattttctttgggactgtgaatggagttaaactctaaaaaagatctataattccaaagtcaggttaccatcaaatattgacatatagcaaaaaaaaaaactactcccttgggaaaattatataaaatattaccttgtcaagagacttgcatttatacaaatgatttatttagcaaaattgttgcatcatgatcaaataggacaaacgttgctaaatcaatgtcactaggcattggcacccttacaagttacaagatacctttaagaaatcgaaaactatttttttcaaaccctttgttttgtgaattaactctttatgagctattttatccctctcaatcggaatataaagagatttttccttacatgacactagtggtctgatcctaagtttgagcttgctcgatgataagcaatgattttaagttttgggtgagaatatataaaaacattggttggagcgttttttgtttttatttttaaagaaaataaaaaataagaatgaaaatatatttatttaaaatttagaaaatattttttctgaatatatttttgaaatagaccaaaaactgaaaataataaatcaacattttcagtcttgtttgaaaaggtgaaaacagcgtggtaccttagagtgctttcttcttaatacattttttttaatcttaaaaatttgaaaatgaaaataaaaaataaacgctcaaatcaagctccacctaaatttttctctattgcaaatgttgaaaaaaatggaaaagcaaaagatctcaaagtaaaataaatatattgtcttttgttacattttgtttcaatgattgtggggaataattgaggtaggataagtggtaggaaaaaatatcaagcaacggataatggtaattgttttatataaaggtttaaatatatttttagtcttttaatttaaaattattattattttttagtccttaaaaacaaatatgcaaattttagtaatctaaaattttaaaatctagttttagtcttgttttgttaactctataacagaggttgtctgtgtggaaaatgatgtgcaattttgtggcgatttctttagtgtgaaaattttgttttaaatttaaatcaaacaaaatgtctcgcaaggcaacaataacgttgttgctgctaacaatcttcgtgtggcaaaatcaacagtggagaaaacgactatcaacaatgttagagaagagttgacgaaggaaaatggggaaaataggacaaacccgaacaaaaaaaccacccttgacttg

SEQ ID NO: 137 - DNA, 8262 bp, Artificial Sequence
  Synthetic polynucleotide
ctacttctagaatgacaactactcctatggcaatatcaattgttagcggtggttcccttaagttcgagactaagggcagtctccaaaaggaagaaaggaaataacaaacttaagcctgaatgttctacgttttatttagtgtctcttgatatttaaaggtctatcaaatatgtataataaccgcacttccactataataaccacactcccactacgataatcgctacaataaccaccacaataactacttctaggatgacaactacctctatataagtttccatgacagaacatcttcttcctaacaccttacctatcacaaatgcttctcctctcggtgtcagagagtactattgattccctaagttctgacggtgtctttttctaaccaaagatccacttttcgaaggtcccgagccaattcgatgagagctcggaggcatagaactcggtttagtcacttatgccatgcttcatttcgtcgcgcgtactttaccaatcaacacacgccatcgagattgatctgcaagtgcagattacgtaagcgagaaaggatttgcaatggaattcacaaatcgcacaatcagagaacaggataagtgtactgctaattatgagcgccagggagtgtagattcatgtcttaggttttaaaattagaacagaataaatatgaaaattgttttttactttctatattttatattttaatttttttttagtttttattattagtaatattgttaattataattaattataaaaattttaacaagtaatttattactaatttatcataagataatttataataaaaaaataattgataatttataattaatttataactaattatttttatattttgtttagtaaagactaaaaggtaattaaaatgtaaattatagagattaaaatatcatttttaaactataagaactaaaaaagaattaaaatacaaactataagacaaaaaagatcacttttaaactataggaactaaaaaaattacttttaaattatatggactaaaaaataccaatcgtaaaattataggaactaaataaataatataaccttaaattttttattttaagatcaattttttaaaaaattaatgttaatcatgatattttatttataaaatatcaaaactcattttgtaaaatggattttcatcaaaataaacgttcactttgctatggtaaatcttgttttgtagtattttggttgttctgacccaaatgacccaaatgcaggctagtggacaatgacattgattgttttgtatatgggttgggtgtcccttgtatcctattgatatattccttttgccttattaagaaaaattgcattagaaactactatatattaaatgctctaacaattaatgattaaattgacaccacatcctgtttgactctccacttttcttttattggtactctctattttagtctgctctttatatacatgttaacttaaagacagcaaatttaccaaagtaacttatcttctctcttgaaagaaaaatgccacagaggaatttagtactattttccacaactatggttagcatagtgctcacacaagcacaaccacgatcatggtcagcattccaagcatccaaagaactagccacaaagcttagtcgtaaccctcaaacctttccacatgcctcaaccgattatgggcacatagttcacaaaaccccagtggcaattttcaatccatcttctgttagtgacatcttggccttgatacatttctcaaactctcttcctaacccattccccatagcccctagagggaaagcacactctgttcatggacaagccatgacaaaagatggggtggtgttgaatatgactaacctcaatagcagttttcaaaatgggttaggggttttggtgtctgcttgtgatggaaaaggtccattgatttgttatgctgatgtaggtggtggccaaatgtggatcgatgtcttgcatgcatcccttgaacgtggactcacacctttgtctttgactgattatatgtatgccactgttgggggcacactatctaatgctggcatgggtggcatgtcctttcgatttggacctcagatctctaatgttcttgaattggatgttattacaggtatgactcactcaattttatcaattaattttcttccatactcatctacacgcttgttcgaagtgaaacatttaactgaattttttttatcttggatatcacaattgtgtaatttttcgtctagatttgtgattatgttaattcaatctgtatatcttaataattatattaaagtccctccctccttcaattatctgtcaaatatttaacgaaatatatttatgtgacatttgagaatgttgatgggtttatatgtgttattttagtcgattagattttacgtgtgaagttttagtgtctcccaaattcttattaacattgtgggaaaaaatgagaaaacaatcgcagaactggagtttgattccagattattattattatttagtaattttattattatctatatcataatagtatatttattaactcatttaatatcatatttattacatatatttagtgtaataatagtatatttattacattctttttacatacaaaaagtcagaaagacttaaaagcttctacaaaaagaaatacctgttatatcagctcttaaagaattacatatgaaatcctacgcatttattacacacacacaaatatatatatatatatatacttaaacagaaatatgaattgttattatatttataattagtatttatattaatagaacaatttatagtttatactatggaataaatttttaaatataaatttattatttatattgatatactcatttatagtttttactaagatataagtttataaatataaatttgcacctcttgtgattttgaactggttttttaataaataaaaaataaataaaaagattataaatataaattattattacattaacataataatttacatttattaatttaatactaaatatatatagtaaatgtatcattaaatgaatgtagtaaacatattattaattttcagaaaagttttaatactttttcaccctagaaatatacaaattttttttaattgatataatttttttttgtttatgattcttgtattaatatttaaaccttccgttggagattaacgggtaaaaaatacaaggtttaaacattatataagtaaagttttcttacaacgacaaaacaaaactaattaatatatttacagctaatgatgtttgtttaaaaagtgctaattatatttttttgttctagtcaatgttgtatagttacccaacatataatcagtgacggactttttagttgtggggaaatattcattatatatatatatatatatatgaatcggtgctgcatataatacaatatatacaattttacactgaaaactgtatattattaaaatttatcaggaattatgcttaaatatcttattgtatctatcttattaaagaaatctaattatatctataaaataaaggtttatttcgatcgttttgatatattgtaaatattattttttttgtttgtttttctcgtataaactttaatacatctatatatgtggcttttatatatagggaaaggagaccttgtgacttgctccaaggagcagaactcagaggcattttacgctgctcttggaggattaggtcaatttggggtgataacaagagcaagaatacctctaggacctgcacctactagggcaagtattagtttcccctttcatatagatttcgtaagggtgaaaataaaaataatattttataggactaaaattaaactaatttcatataaacctaaattaaaactcactcaaattatagatgtattaaaatcatatttaatctatatatatgccatttaattttaattgaaacatacatattatatatagatcattttttcctgtaaacttagtcttagacactatacaacttcaatactattaaaattgtaccaaaattaactatcttaaaactaaaaatgagaataagtcgggtaattgacataagtctatgagctcacttgtttaaagcttggtctcatctatctaataaaaaaagttaaacttaaactttttaaaaagtctatttatttatataatttagacttggacttgtgaaaaaacttattaaactgtatagaccggtctaattattcatttaaatatagtaaaacattaaaatatattatacttttattttaatatcttaatatgttaatatatttttatcataaataaaatgaatatttgaaataaatagatctttaaatatgtaataagctaaactatatcatatcttaatttttataacatgccatacctatatatttatataacgtctaacttgacctaacatattatcacccctacttaaaaattatttatctatttatttttaacaaagtttttttcatgtgggtgtttgcaggtaaaatggctccgcctgctatacaacaacttcactgcattttcaagagaccaagaacatttaatatcgttcagtgaaaggaatgacattgctacagcagattatgtagaaggcatgcttctattgaatcagccgccactggatcttctcttttatccagcttctgatcatcaaagggtaacttccttggtaactcaatatggcattatctacatcttggagcttgccaaatactattacaataactctcaggcacatgtcaatgaggtaacttgaaataaaagttgtttttagcatctagttagaaacttcttttatttttattcttatttttttatggacaacatatataatgaatttagtaaagaaatacagagatattctaattgttatatattcatcatacatcaaagatcaaattaatcctcctgattgaaaagaattttgttttcatgaatccaaaagaaacatgtctcaaactcactcaaattgtatggaacccatatattaattaatttatgtacaattcattgttttttactaaattgattatttttcttgtttcttaaataggaagttgcatatttgctgaaagggttaaactttgtacatacatttgtgttcgaaagagatgtgtcatacgaggagtttgtgaacagagtttatcctttggagcaaatgcttaggtcagaaggactttgggaagttcctcacccttggctgaacctctgggttccaagatctagaatctcagattttgatgaaggtgttttcaaggacattgttcttaagcaaaatattactggcggaagttttctagtctacccaacaaacagaagaaacaagtaaattgattagattatttatttttttgtgagtgtcaaattattatctagatcacccgtctcctttaatttacatatcctttctagtgtttccaatatataaaaaaatgacacctcactaaaaaaaataacaaataagagaatttattgttttttaaccacatttttttattgagagaaaacactccacaagaaaaataataataacaacaaaataatttatgtaatttttaaaagaaaaggtcacttaaatttttgcaactctaaaattagttattgaaaaaaaaaacctcaagtctcacatttactagaggaacctcctaagttttttctaaaatgaatatatttctaaaggatatgagacttaaagttttttcaatattaatttacaacattgtgctctgattcaaagtcaagcaatctcctagaataaaagagattgaaaatagcactaacactattggtggggtttgtggtttgtggtctgtggatttaaatttggcatgtggtatttaacagaacttcaacagaggtataaattataaaagatttttttttctgagaaaaagaaataaatggaggtatgttattaaaagagggagtatgaataacaactgtcctaataatactccattgggcctgacagtaggagttgggccataacaattagggacaaaaaataattttggttactaaatttagtcaataattccttttcttagtcacattagatgtttctgttccaatttatttgcttatgtaaatgacttaatttatacatatgtgaggattaaattgaatcaacattatgcttcacaggtgggatgataggatgacaccaattacacctgacgaagatgttttctacgttgtagattttttgcgtgttgctaaaacgtttgatgtggtggacaaactacaggttcaaaacaaacagatactgcggttttgtaatgatgctggtattaagatcacagagtatcttatcgggaacaaaactcatcaacaatgggtggaacactttggcccaaaatggaaactttttgcagatagaaaaactgaatttgatcccaaaaaaatattgtcacctggacatgggattttccagtaaataatgtgctaggtttcagtgaaatctctcattttggaaattcatgaaataaaaatgaaattctgtaccagaaaaaaaaaaaaaaacttgttgtgtaattctgtgccaaacatacattgaattggattgaagttattatgcaattttgtacgaaaaaaaacttatgtatttgattattttatgtttttttattaatgttgaatgttcaaatattctcatgactcacgaacaacggcagatctagaagaaaaaaatggtcgtaagatgtgttgatggtatttaaatgaatgcatgtctacttcaaaatttatttgatagactcatttcgtaaaaaaaaaaaatagaaataacctatttaacaatacttgtttggaaaataaatttaaaaataagaaatttggtcgtttttttatatagaaaatagcattgtttttatgatattttaatgcaattcacgattttatgttgttgggtttttaaataaataaaagttacataaaactttagttttaaattttctttgggactgtgaatggagttaaactctaaaaaagatctataattccaaagtcaggttaccatcaaatattgacatatagcaaaaaaaaaaactactcccttgggaaaattatataaaatattaccttgtcaagagacttgcatttatacaaatgatttatttagcaaaattgttgcatcatgatcaaataggacaaacgttgctaaatcaatgtcactaggcattggcacccttacaagttacaagatacctttaagaaatcgaaaactatttttttcaaaccctttgttttgtgaattaactctttatgagctattttatccctctcaatcggaatataaagagatttttccttacatgacactagtggtctgatcctaagtttgagcttgctcgatgataagcaatgattttaagttttgggtgagaatatataaaaacattggttggagcgttttttgtttttatttttaaagaaaataaaaaataagaatgaaaatatatttatttaaaatttagaaaatattttttctgaatatatttttgaaatagaccaaaaactgaaaataataaatcaacattttcagtcttgtttgaaaaggtgaaaacagcgtggtaccttagagtgctttcttcttaatacattttttttaatcttaaaaatttgaaaatgaaaataaaaaataaacgctcaaatcaagctccacctaaatttttctctattgcaaatgttgaaaaaaatggaaaagcaaaagatctcaaagtaaaataaatatattgtcttttgttacattttgtttcaatgattgtggggaataattgaggtaggataagtggtaggaaaaaatatcaagcaacggataatggtaattgttttatataaaggtttaaatatatttttagtcttttaatttaaaattattattattttttagtccttaaaaacaaatatgcaaattttagtaatctaaaattttaaaatctagttttagtcttgttttgttaactctataacagaggttgtctgtgtggaaaatgatgtgcaattttgtggcgatttctttagtgtgaaaattttgttttaaatttaaatcaaacaaaatgtctcgcaaggcaacaataacgttgttgctgctaacaatcttcgtgtggcaaaatcaacagtggagaaaacgactatcaacaatgttagagaagagttgacgaaggaaaatggggaaaataggacaaacccgaacaaaaaaaccacccttgacttg

SEQ ID NO: 138 - DNA, 5753 bp, Artificial Sequence
  Synthetic polynucleotide
ataaatggtagaaatctgtgggttcaaatgttcaattgctggggatcttcgtgatcatgatgattcatacacaatctctagaaacacgtacgcaaatattaattaatcaatttcctttttatagtctcctcacaattcacatgaaacttcatactctattatccgattccatttccatcgtatctttgaatttgacatttgtttgcccaacatgtaattaactttcccttctcatcttaaagatgtaacatgatatatattataacttgtaattaacccaatatttttaactctctatttttacactcatctgacatgtatttttatttttcatttttttttcttatcacatcacctcttacgtgtacaatttttctctttttcttatttctgtcttccataatagtaattaatattcatcggtccgatatgtatacagcccaaaaaagtgtgtaaaatcatttttgtatttctaaccctctctttctcatgcaagctagcttcttctttctatttatagcccttctcccttcacccaccaacacaccacaactccaaactttttcctcttgttctcttcttcttcaacacaactagtcataatccagctcatctctctctccctctctctttgttctctctttctctttctccaaaatggctctaaactacccttttttaacctacttcatactactgctagtgatattcactgtgggaaaaactgagcaatggaaagctccgattctaccagagcttgacattgataacatatcccacaaactccatgatgaccctgaaaccattcaaatggcttcaagggactatggccatttaacgcatgaattcccattagctgtgtttcgtccatcttctatagatgacatagtcaccttgataaaatcttcgtacaatagctttgccccttttgacatagctgcgaggggccaaggccactccactcatggacaagccatggctcgtgatgggattgtggtggacatggccagcctaagaaaacaaagaaatggggttgcgattagtgtctctaaggaccctttgatgggtcactatgctgatgttggaggggaacaactctggattgatgtgctacatgccacacttgaatatggacttgcaccagtttcttggactgattatttgtacttgaccgtgggagggacactttctaatgctggaatcagtggccagagcttccgttatggacctcaaatcagcaacgttcatgaaatggatgtcatcactggtatggagttagttgttttttttaatcaataaatgttaatattattagcttgttagttttttttgaaaaaattgaattaactttcgtttcctcttttctttctttttttaaccacacaattaatctaataactactggtattaagttagtttattttccatttttcatatataagttaggatttctaattaaaattgacatttcgtaccaccactacaaaaaaataatgtatcagtggcacaaaaaaatatattggcatcacttgtttttttagtcattaatattttgtagcatcacaaaaaatatggtgacaagttttctaaaaattacaaattaactgattcgtcagtgatgttaatgattttttagtgcgtcttggcaactaatgttttcatcttatataaaattagaaacaatagcggcaacagcacctgacattgtgtttgtgttttgcgtgtttctatcgcctaatttttgttgagaacgtgttcgtgaaacttggaaaaagagaaaattgaaattttcttgagatatctaccacttaagaaaaacaaatggctgtttccgttttgtctcttatgacatgacatggtacgtcatagatgaagttctgctaaatatatttgatatgatttcttgaacacgttttatatattcccacttcccagttagtgtggttgttgaatctaattaaaacaggaatagtctttgtctacaatatgggtgagcgatgcaaactttccaagggtttagaagttagaactatataggtccacggtcataattttatattcttgattaactttatgttggttaagtcgttcatatttggtcaattcattcatatgagaaaatactgaaatacaaacatggaaaaatgttaattactcttataattggcgcatgcatgcatctaaattatatgattttaataaatagtttttgtcatctacttgatttcaggaaaaggagagttcgtaacatgctcttcacagaagaacttggagttattccacgcggttcttggaggcttgggacaatttggagttatagcaagggcgagaattgctcttgagccagcacccaaaagggtacgtttatagagaattgactagaattttgtcttgtagcttttcctccaccaattcatatagtgacacctaatcgaattgtcatttttttttacggtgaattgtcattttgtaaatctaccaagtggtagttggcacccatatatgtatgaactatagtaccatacatttcattttatgttggtgtgttagtcatccatgatgaacacatacacaaatgaaaataggacgagttatacgtacgtaagggtttgaatcactgaatgtggatttttgaagttgaaagcatattaatcttggtttgaaaaagaaaaaaaaaatcggaagtccctcttgaagttatcatgactcttatattaagccaatagaattagaaaaactataattatgaatgatcatgttaattctttcagtgacttaaaatcttatctacaaaaagtacccttttgaaaaagaccttcacttaagtccatgcatacagtactaatcttacatacttgagagttgagacttgaagcatgaggagatttgaagtctggagaaacaagccaccacatattaattactaccgtattcttatctttatttatccttccaattttgatgggactggttgcacatacattcatacatactaacatacataaatacgtctctctctcatgtatttcattttattatattctatttcgttagtaagtttactagtataagacattattaatggtgaatttttgttggcatgcaggttaagtgggtcagactactttatagtgacttttctgcttttaccaaagaccaggaacgattaatctcaatcaatggaaggaaacaaaagaacgcattggattttctggaagggatgctgctaatgaaccaaggccccataaataattggagatcctctttcttccctctatctgaccatcccagaatagcttctttaataactgaacatagcatcctctactgtcttgaagtggctaaatattatgacgaacaaaccgagttaaatgtggacaaggtaacctcgtctagtcatatctattatatatagttagatcttgtcacatttctttgtttaaaaaataaaataaaaggcacaatcccaaaaagtcaaaagcaaatgcctagatattgtgtgttttcttggatattaattattacaccttaataacccataataatttttttatttttctttgtctctgtaggaaattgaagttttgctccaaggactagcctatatccctggatttaattatgagaaaaatgtctcgtacgttgagttcttgaatagggtccgaagtggagagttgaaacttcagtcacaaggactgtgggaagttcctcacccgtggcttaatttgtttataccaaaatctcaaatcttggattttaattcaggagtattcaaagatatagttcttaaaagaaacatctcctctggaccagtcttggtttatcccatgaatagaaacaagtaagccttgaatgcatgaatcacaatctagtgtcattataattcaggagtgtgtgatgcaatcttttaattttctgaccattcaactcaatatcaattttatttcttttttcaattaaaatgcaaaagagaataataattaataatatgaaatttaattccaggtgggacgataggatgtcagcatctataccagacgaggatgttttctacacagttgggtttttgcactcaagtgggtttgatacttggaaggcatatgatgctcaaaacagagaaattttggagttctgtagagatgctggcatcatggtcaagcaatatcttcccaaccacagcacacaagaagattggacaaaccattttggtgctaaatggatgaaattcttagaaagaaaacatcagtttgatccaagaatgattctatcacctgggcaaaaaatcttccacaaaaaattacagccagtgttttaaatattttccctaataaaaaaagtaaaaatgttttgtggtgggactacctcaattagatggctagctagggacaggtgtacatacagtgtgaccaagaccaagatggcttttgtatgctaaagtttgcattgctagctagagaaattaataaggtggggcattaaaggctgcatgagtacttttggcacctattatgctacatattaccttagatacgttaggttgacaaagtcgtactggtaggtacaagaagcacagttgtctctcacactgtctgtcacccaacttgctatatagtgtgtggagaaattcggatcatattgaagatgctgtgagttatagtcctccaatattaaatgtttaacgattctgtctttctcttatataattttgttttgcattatattactttcgcactggtgcaaacatatatatcaatgattataattaatttatacaatgacgagtataattgtacccaagttgcatgccataatatttgtcaaaaacaaaaagttgtatgccataatcaatccaggttgctagataataagatagatatgaatatgataacataaaatgctattaaagcaacaaataaacaataacacatagtccttatagggttcataattgatcgatgaacctagctagacgttgattttaggttaatttccagcgaggataaaatttattatataaagaaataactaaccaacacaaaataataaaaaattaaaaaaaaacgaagaaacttattttagagatataatttgttttagtatttgattgtaatttgagagattagctaggctctcaccaagtgagatctagagtatattcttaagaaaatatttataataaagaacccttaaacattttgcaaaacaaagggtggaattaatattaacaacaataattataatatcttgaaaattttatgaaaataatatatatatatatatatatatagagagagagagagagagagagagaaaattctcacaaacaatttttatctgttatttcaaattggtgtatgactccttagtccttagttcatttgtttgcacccagtcctgtcttaggtagttgattttatagttaggtaaattaatttctcgcactcttcgcttgattgtcatttatgggttgaactgttgaagtgattttatattttttaataaatttcacctgcaaaaaaactcaccattagcatacgccccccccccccccccccccccctctcccaaaaaaaaaaaaaaaacgaaagaagattaattagaaagaataaggtcgtgaaatgatgttacaaataaggcatatcagaatcagacgcaagggaagaataaaaacgttacaacaattcgcgcacaatgcaccccaaaaaaaaaatgacaggcacacataccttaaggaagaagaatcaacgctttca

SEQ ID NO: 139 - DNA, 7395 bp, Artificial Sequence
  Synthetic polynucleotide
ttaaatcggttcaaaattgttgaatcgatccaaaactagtaaatacagtaggttaattgatttcacttgaaatttaaaaaaaaaaaattaaaatgacgtcattttagtttttttttaaattattataacttatatgacatttttaagtgaagtttactttttattattattaatttatgcatactaggtttctgaaatattatattaaaatattatatatatatatatatatatatatatatatatatatatatatatatatatatatatatatatattattaaaatcaattccacttcgattgagctattaacttttgaaccaatatcttccccagttcaatgaccatccaagtctgaaaacattggttaccatcaacgttacccttccgtgaattggaaaagttaatgcaatataggttgatccaaggataagtcctatggtcccagaaagaaaatcttgagagatccttttgataattacccgagtttttactctctccttttaattcacgaaattggaaacttcaattgctaatataaaaagaattttgttagccaatatcatcagggtattgtcaaagaattacaagaaaaaaaaattataagataacataaaaaaataaaaaacaacataattttatatattttaataaaaaattcttttaatttttttttatcaatattctatagttactggcatttgacatgtaaaaatgtaaacatatgaattgataaaatttgaccaatgtttgaccctgagataggaatccaacggccccagttcaattgcaatcttttatttttactacgtgaaggcccaacaatggagaaccttgtggattttattgctgagaatctgtggttacgatgatgacacaccaacacaatcacagaaagcaagtaccgtttggaaggcctaacacttcattaattgcttcattaaatttattttactttctagctgctcaatttaattgctttacacaaatacttcatgacgtttcagaaggagggccaaatacaatctctacaatggttccatcgtatctttgaatttgacatttagcatccctccctttgcacaatgtacaatttgcattttgaatatttttttctcaccttcatatcgtgggactacttctataaccatcctggtgaaaataaataaagcgagggaattacgtaattaaacatatttaaatttctctctcctctgtttaattaatttatcaaaaacaaatatgtgtgcgagtatttaaaaatgtgtaaagtattattattttttaatttttcttttttccttctcatcaatgataaatatactttttaatataaaaatcaaacaataactataaaaaaaacatcttcacttcaattcaacattaaataaaaaataatccctgctttgttattttttacccaccaattatcatatttgttatttattatttttttatgttcttgctataaaggaaatcactatttgactcacacaaaactataaaggaatcaaataatcaattattatttaaaaactctattaaaataacaattacaacaaaatcccttatttttttcttccttatcattattaaaccttcccattctctctttctatctctacatgtttttctcaaattaaatattttctatatcctcctttatcatgcaaattaaagtcctcttccattctatatatagccgctacctcctccacctcctttccccactacaacacacaaacaccaacaaccaaatcaatccatccaccctagaaacaacaaagcactctctcttctctcattctattatcttctctcatcctcttattctctccaaaccaacaaaaaaaaaatggttgctgagaactacccttctcccacatacttcatcctcctgttcataaccataacacgtttgatctccacagtgggcaaaacctcccaatggacgaaggccctgtcgctgcctccggaactcgcctccgtctccctcgacgacaccatcttctgcaagctccgtgacgacccagaggccagggaagggcctccagggactacgggaacctcgtccgcgaggttcccttggcagtcttccacccagcctcagcgagcgacatcgcgaggctgatcaagctgtcgtacaacggctctgtccccttcaagattgcggcgagggggcaagggcactcgacaaggggccaggcgatggcacgtgagggggtggtggtggacatggcggggttcagagagagagggaatggagtggggataagggttgtgagtagtgtggaccctaataataagaatggttactactattatgcggatgttggaggggaacagttgtggatcgatgtgctacacgccacgctcgagcatggacttgcacctatgtcctggactgattacttgtacttgacgctgggagggactctctccaatgctggcatcagtggccagacattccgctatggtcctcaaatcaccactgtccgggaaatggacgtaatcaccggtaagaaaactttccattcaaccagttaacttacatgtttttagttttttagcttccaatatccaatagtttataacttgtaagcttcaattttatgttaatttataagctagttttaccctacttttgaaaattcaaggattttggtactacaataactcccttgtcaaactcgttcaattgttggcttagtatcaagtagactcttggatttttaggtgtactttaacaaccatgttaatttaattgatcagggttttaatattatggaaattggccattggacaacttggaatggaaggaaagcgggagatggaaagggaaaagaaattaattagaataattgttaatattagttgcgtgaaaaaaattaaatttgctgaattaaattatggttcatcacgactctatttgtggcaacaccaacgtgccgttttcagaacttcattgcaacagcggttatagtggcgtttattcaattcatattttaatgcatcagactgtgattgcgattgaaattttatgaaatcttgttttataaacttgttcttttgattaggaaacttgattctattttatatatatttaatgtaacgccgaattaatggttgataaacgagtctttgtctaaaattttggcgaatgttagcaagcgttttccacgtggtcccgtacgtgtttgaaaaattcttaatcatggaatcagttcacacgggcagtcatagactcatagactccaattcttgattaattgttttcttattaatattggtccatggtcttattttggtcaattctttttattaaaaataaacgggctgctgaattttaatttactcaagtgtttgttaatgaatatgtgtgcatgcatgcaattatatatatatatatatattactattatttatttgtgttttaatcaaattttggtttggttcaggaaagggagaatttgtgacttgctctcagcagacgaattcggagttgtttcacgcggttcttggaggcttaggacaatttggaattataacaagggcaagaattgctcttgcgccagctccgaagagggtacgtttaaaatcttcggaattgactaggacttgtcttgttgcttcttcctccaacatctctcatatagtaacgcaaatttctaaatatgttacattattaattcaaccaccaagctttgcggaagcatcaaatgtcgttgtcctgaaagcttcatgtcatcatttttcttggcacccatatacacacacatacgtttcacattgtgtcagtgcatattagtcatccatgaaagacacatgtacaaatgaaaacgagaggagttatattaaaatgtgtgttggaaaaatatatatcatattttcataagtcttaattttgaaattaatatacagtaaccctttgagaccttagcaattaagccaataaaaaggctcgtattaaccccaaccaacaactattagaaaatactaacaagtataggtgtatacataaatgattcatttgaattttagtaccttaattatttaactttatccttctatttgacgggactcgttgcataagccatacatacataatcatgcgttcattattgtttttcattatgagttaatgagttgattgtatgaactaatggtgaatttttgttggcaggttaaatgggtgagacttttgtacaatgacttttctgcttttaccaaagaccaggaacaactaatatctatcactggaaggaaacaaaatgtttcactggattatttggaaggattgctgctaatgcaccaaggacccataaataattggagatcttctttcttccctttagccgaccatgcccgaataatttcgctagtaactaaacacagcgtcctctattgcctagaagttgccaaatattatgatggccaaaatgaaaacaatgtggacaaggtaccatctccattcatgtgcatttgccttgatgatgtttcttctattttttcttttaatgttttgatctcaccttatataataaccctttatcacactcaatcttgttatatttttaagagtttaatgataatattatgattttgttgtgaaaaaagagagtttaattgttattatataatcacaaattatcattaatatgacttttaaaataattaataatataaaaattaataaatttatcgtatttaatgagttataattaaatgatcatataaaattattttatattattaacatatagtttttttttctatttttaatatttgttttactataagttgttatattttcaatcttttttctagtataagttttaataatcaatattgtaagtaatattctcatttttcatgttgtgtaggaactccaagttttactacaaggattgagctatatccctggattttactatgaaaaagatgtctcatattttgagttcttgaatagagtccgaagtggagagttgaagctacagtcacaaggactatgggatgttcctcacccgtggcttaatttgtttataccgaaatctcaaatcatggaatttgactcgggcgtgttcaagaatatcatccttaaacgaaacatcaccacaggacctgtcttggtttaccccatgaatagaaacaagtaattgagcttaactaactaatctcaacttatgttgttatcattaggaaaaatgttaattggtacgaaaactatatataccactattttcatttaaattcatgaaagtgaaatttctctttcctaaaacaaattctttctcttaaaatgaatttttgtttttctcaatctccatcaattacttatttccttttttgaatgtttgaaaagtcattcacaacattttcttcataaaagggttattcgtaccaatttaaatagaattgccgttattatcagatgtacaattcttctcttcactcacttcttttccattaaaattgtaaaaaaaaaataaaaaaatcaggtgggacaataggatgtcagcatcaatacccgatgaggatatcttctacacagttggatttttgcattcaagtgggtttgataattggaaggcctatgatgctcaaaataaagaaattctacaattttgtaacgttgctgggatcaaggttaagcaatatcttccccactatcgcacacaagaagattgggcaaaccattttggccctaaatggaggacttttgtagaaagaaaacaccagtttgatccaagaatgattctatcacctggacaaagaatctttaacaattaaaatagctttaaaaatatatattcccccccccccccccccccccaaaaaaaaaaaaattatataatatggtgggactacccaagttagctagctggctgatcacaagtgtgcacataggacccagaattcagatgatagcctttgtacttgtttttgttaagagggtggggttaaaagctgcatgactttggcatatatgtagatcaggttacacatactttagatacgttaggttgacaaaatcatgtgtgaaataagatgcacacagctagctgtgtacctttctttctctctgtccctcaatttgtctatcactaaaaagatttctatatagtttagaacctagtgaagagaaagaaaaaaccattatattgaggatttaattttatcacgttctaatcctatacattaatattcttaaatgtgcaatgagtgtgctcggtgccttaatgattctttatctttgttaattgttatattgtagggttttgtttttgccttcctaattttgtaacaggggcacccctagcaataattgagatcctaggttaactaaggaacagcattattgtgtctaaattgagattcctagctgtatgccataataataaatcatcgtaggttgctagatagatgtgatagcgccaaatgccttccaatactataatctccattgcaagatccttcgttgtgattgtgtagaaaagattacgctgctttacaagagaatactccaagaaagcaagtgattgctccttaatataaagaatcatgcaataaacaaatggtgtcgtaatccataaagtgtatttaatatttgatgaaagagtagtgtagacatcaaacaaaataaagtttgatgcaattcgaattatagatacttgattaatctctaaattatgttgagacaatcatatttgaatttgataagactattatgaacgataaaaaatattataaataataaaaaaatttcatcaaacatttaatacaattatataccttactcaaatttgaaaacctgtacatataggaaaaaaacctttactaaaagaggttaaactcaccatacggatttttatatgtcgaagggatctttaattgtccatcggaaaacatcctaattcataaaaaaggaaagaaagtttagacatgaataattacggaccaatgaatgcaacctacgtctctcaattttaaggagaatttaggaatattatagtatatcactgaaagtacacacaagtggcaatgatgaatattttaatttaaagttttaattggattcgaaattaatcccttcttttttccagaaaaaataataatcatcgagtaatcaagacaatttcccaagtagacaacaagaatacaaaagagaatacgtgacttcgtttcaccatagaaaagaaggaatgcaataacgatgataataattataaaatgaaattgacaaaatatctaaatgcctgtagatatttctacagcgaatgataagtgtttttccattaaaaataagtttcttttgttaagaatttctaacatttttagttccaaaatataggaatgaagccaataagtaagtaagaatttctaacgtctgaaag

SEQ ID NO: 140 - DNA, 3651 bp, Artificial Sequence
  Synthetic polynucleotide
cttctcatccaatctaatagcaggatacgcgatgtttacattccgacaatagtggactcagtaccaacaccataaaaaaaaataaacaactagttatgtgtccataggggcaaaagaaaaagaaatacgcactactgtggaaagaagaaaaaaagcaataaggacttatttctatatccggaaaaagcatatatccttaaattggttaatgaacaaaaacttgaaacatgtctttccttcatgtttttgttgtaacttataacataacatgtaattgtttgtggttaccactgtttggaaaaagttgaagatttgtgagatctctcattgatgttacttttcctcttcaacttggcttctgtgtcactgtacatgtgatgcctttggcgtctctcttccttccaagtaagcagtccacatacgcattctcctcgtatcgtatgtcataagtcatgactgatcaacaatgctacgttgaccaagccaccacccacaaactcctttaaattctggcccaaacccttaagttcctgcattctccaatccatcactttctccttttcctcgtgttcacaaaatcacgctgcttaattattccttcaactaccatcatatcataccttctcaacagaaaaataaaaataaaaatgagatacatccttggagaacacaacattctgttcctcaaaagcttcgcctattccttagttgcatagccattcggcttaacttgtgtctttccagcatcccttcttcactgaaatcaattccccttgaagggcatttaaaatttgatcaagttagcctaagccatgcagcaagggactttggcaacaggtaccaatataatccaatggcagtgctgcaaccagaatcagtttctgatattgtagccaccataaggcatatctggctgatgggtcctggctcccacctcaccattgcagcgaggggccacggccactcgctgcagggtcaggctcaagcccatggaggacttgtgatcaacatggaatcactcaaggtcccagaaatgcaggtatatcgctaaatattaattgttaatcgttaattttttgttagctaggcaatcaaatccacaatcttttcctctcttccttcttcttatacaaccaaactaaccttataactccaatgcagatacatgttgatgagggaaacaagtctcctccatacgtggatgtctcaggtggcgagttgtggataaacatattgcatgagactctaagatacggcttggcgccaagatcgtggacagactacctgcatctcacagttggtggcactctctccaacgctggtgtcagtggtcagacatttaggcatggtccccagataagtaatgtacagcagctcgagattgttacaggtttgtgaaaaagagaatgaataataattgtttgtcttttctgaataataattcatttgatactggctgcatataagttttctaataaataatttttttcccctactttgatgagtaaaacatggtcaatgaatggatgcaggaacaggggaggtgttgaactgttccgcggagaataatggggatctctttcatggtgttctagggggcttggccaatttggcattataacccgggcaagaattgtcctagaaccagcacctaccatggtaatgcatcactcatcagtgactataccaaaacaagcttctttttttttggttttaatgtgtgctttgggtcatgactgaaaattttctatttattggaacaggtaaaatggattagagtgctgtactcagatttcacagcattcacaagagaccaagagaggttaatatctgcagaaaagacttttgactacattgaaggatttgtgataataaacagaactggtcttctaaataactggcgattatccttcaacccacgagacccggtccaagctagtcatttcaagtcggatggaagaactctcttctgccttgaaatggccaaatacttaaacgtggaagaaatcgatgcagcaaatcaggtgaggccagcaacactcaatctaatagatttttttgaaaataaagggataattaactccaaggttttaaaatatgagaccgtgggttgcaacatcaaagttttctaactctttgcgacccgaattgagactatgtcgatagcatttgtctatgatttgcccgtgatatcaacaaacacgaccaaaccacatgcgactgcgacctatatttaaaaccttgattaactcattagtgataatctttctttaggaaagaaaataaaagaggctaaatcaaccgtatctcacttttgtgtgtgcaggaagttgaggaacatttgtcccgtttaagctacatcccatcaactcttttttcaacagaagtcacatttgtagatttcttagacagggtgcacatatccgaggtcaagttgcgttcaaaaggcttgtgggatgttccacatccatggctcaatcttctaatacccaaaagccaaatactcaactttgcacaagtcgtcttcgggaacatcctatcagaaactagcaacggccccgtccttatctacccagtaaacaaatcaaagtaatgaatggttcagaaaaaaacatactattaactctagaaacaaatattttagccgtcaatattttttaattgacatgttttgttttgtttgcaggtgggacaacagaacttctgttgtgattccagaggaagatattttctacttagtggcatttcttacatctgcagttccatcttcaaatggaactgatggcctagaacacatactaagtcagaacaaaagaatattagaattctgtgaaagagcacaacttggagtgaagcagtatttgccccactacaacacacagcaagaatggagggcccattttggtcctcaatgggagacttttctgctgagaaagtccgtttatgatccattagcaatactcgcccctggccaacgtatatttcaaaaagcaataaccttctcatgaccacatttttattattaattattaaaaatctgaaaaaaaaaaagagaagaaaagtccttcatggcatgtgccaaaatgaaaaaaaaatgttatatgatccagacaggttttgacattgaccatacagaatgcaattgcaaaggaagaaggttcattgatagtagagaaaaagagggagaaaaagagattacaaaatgatgactggtgagatttgtatgccttgcaggttaatgaggaaagttgtcagtgtatgtaggtatgtaccattactgatggaaaaattgccttacgtgctgagtgtagcaccaaggcagcagggtccggctgagattagatcaacaaaacacattaatcattgtagggtttccaaagaacttataaatattatcagcgctagagccaatgtatagtactatcaattttgtaaacactcccttatttgttctctgtctcacatgtatccaaattcattaagattataattaaatacagatatttatgcatccaccacaaaaagatatcaatacgttcgcaacaaatacagataagatgatatataatgctgagtaacaaatactactattctagaaaattgcggaaaatgatataaaaatgggtatgcctaccctgaaggatgatgaat

SEQ ID NO: 141 - DNA, 3652 bp, Artificial Sequence
  Synthetic polynucleotide
cttctcatccaatctaatagcaggatacgcgatgtttacattccgacaatagtggactcagtaccaacaccataaaaaaaaataaacaactagttatgtgtccataggggcaaaagaaaaagaaatacgcactactgtggaaagaagaaaaaaagcaataaggacttatttctatatccggaaaaagcatatatccttaaattggttaatgaacaaaaacttgaaacatgtctttccttcatgtttttgttgtaacttataacataacatgtaattgtttgtggttaccactgtttggaaaaagttgaagatttgtgagatctctcattgatgttacttttcctcttcaacttggcttctgtgtcactgtacatgtgatgcctttggcgtctctcttccttccaagtaagcagtccacatacgcattctcctcgtatcgtatgtcataagtcatgactgatcaacaatgctacgttgaccaagccaccacccacaaactcctttaaattctggcccaaacccttaagttcctgcattctccaatccatcactttctccttttcctcgtgttcacaaaatcacgctgcttaattattccttcaactaccatcatatcataccttctcaacagaaaaataaaaataaaaatgagatacatccttggagaacacaacattctgttcctcaaaagcttcgccttattccttagttgcatagccattcggcttaacttgtgtctttccagcatcccttcttcactgaaatcaattccccttgaagggcatttaaaatttgatcaagttagcctaagccatgcagcaagggactttggcaacaggtaccaatataatccaatggcagtgctgcaaccagaatcagtttctgatattgtagccaccataaggcatatctggctgatgggtcctggctcccacctcaccattgcagcgaggggccacggccactcgctgcagggtcaggctcaagcccatggaggacttgtgatcaacatggaatcactcaaggtcccagaaatgcaggtatatcgctaaatattaattgttaatcgttaattttttgttagctaggcaatcaaatccacaatcttttcctctcttccttcttcttatacaaccaaactaaccttataactccaatgcagatacatgttgatgagggaaacaagtctcctccatacgtggatgtctcaggtggcgagttgtggataaacatattgcatgagactctaagatacggcttggcgccaagatcgtggacagactacctgcatctcacagttggtggcactctctccaacgctggtgtcagtggtcagacatttaggcatggtccccagataagtaatgtacagcagctcgagattgttacaggtttgtgaaaaagagaatgaataataattgtttgtcttttctgaataataattcatttgatactggctgcatataagttttctaataaataatttttttcccctactttgatgagtaaaacatggtcaatgaatggatgcaggaacaggggaggtgttgaactgttccgcggagaataatggggatctctttcatggtgttctagggggcttggccaatttggcattataacccgggcaagaattgtcctagaaccagcacctaccatggtaatgcatcactcatcagtgactataccaaaacaagcttctttttttttggttttaatgtgtgctttgggtcatgactgaaaattttctatttattggaacaggtaaaatggattagagtgctgtactcagatttcacagcattcacaagagaccaagagaggttaatatctgcagaaaagacttttgactacattgaaggatttgtgataataaacagaactggtcttctaaataactggcgattatccttcaacccacgagacccggtccaagctagtcatttcaagtcggatggaagaactctcttctgccttgaaatggccaaatacttaaacgtggaagaaatcgatgcagcaaatcaggtgaggccagcaacactcaatctaatagatttttttgaaaataaagggataattaactccaaggttttaaaatatgagaccgtgggttgcaacatcaaagttttctaactctttgcgacccgaattgagactatgtcgatagcatttgtctatgatttgcccgtgatatcaacaaacacgaccaaaccacatgcgactgcgacctatatttaaaaccttgattaactcattagtgataatctttctttaggaaagaaaataaaagaggctaaatcaaccgtatctcacttttgtgtgtgcaggaagttgaggaacatttgtcccgtttaagctacatcccatcaactcttttttcaacagaagtcacatttgtagatttcttagacagggtgcacatatccgaggtcaagttgcgttcaaaaggcttgtgggatgttccacatccatggctcaatcttctaatacccaaaagccaaatactcaactttgcacaagtcgtcttcgggaacatcctatcagaaactagcaacggccccgtccttatctacccagtaaacaaatcaaagtaatgaatggttcagaaaaaaacatactattaactctagaaacaaatattttagccgtcaatattttttaattgacatgttttgttttgtttgcaggtgggacaacagaacttctgttgtgattccagaggaagatattttctacttagtggcatttcttacatctgcagttccatcttcaaatggaactgatggcctagaacacatactaagtcagaacaaaagaatattagaattctgtgaaagagcacaacttggagtgaagcagtatttgccccactacaacacacagcaagaatggagggcccattttggtcctcaatgggagacttttctgctgagaaagtccgtttatgatccattagcaatactcgcccctggccaacgtatatttcaaaaagcaataaccttctcatgaccacatttttattattaattattaaaaatctgaaaaaaaaaaagagaagaaaagtccttcatggcatgtgccaaaatgaaaaaaaaatgttatatgatccagacaggttttgacattgaccatacagaatgcaattgcaaaggaagaaggttcattgatagtagagaaaaagagggagaaaaagagattacaaaatgatgactggtgagatttgtatgccttgcaggttaatgaggaaagttgtcagtgtatgtaggtatgtaccattactgatggaaaaattgccttacgtgctgagtgtagcaccaaggcagcagggtccggctgagattagatcaacaaaacacattaatcattgtagggtttccaaagaacttataaatattatcagcgctagagccaatgtatagtactatcaattttgtaaacactcccttatttgttctctgtctcacatgtatccaaattcattaagattataattaaatacagatatttatgcatccaccacaaaaagatatcaatacgttcgcaacaaatacagataagatgatatataatgctgagtaacaaatactactattctagaaaattgcggaaaatgatataaaaatgggtatgcctaccctgaaggatgatgaat

SEQ ID NO: 142 - DNA, 8266 bp, Artificial Sequence
  Synthetic polynucleotide
ctacttctagaatgacaactactcctatggcaatatcaattgttagcggtggttcccttaagttcgagactaagggcagtctccaaaaggaagaaaggaaataacaaacttaagcctgaatgttctacgttttatttagtgtctcttgatatttaaaggtctatcaaatatgtataataaccgcacttccactataataaccacactcccactacgataatcgctacaataaccaccacaataactacttctaggatgacaactacctctatataagtttccatgacagaacatcttcttcctaacaccttacctatcacaaatgcttctcctctcggtgtcagagagtactattgattccctaagttctgacggtgtctttttctaaccaaagatccacttttcgaaggtcccgagccaattcgatgagagctcggaggcatagaactcggtttagtcacttatgccatgcttcatttcgtcgcgcgtactttaccaatcaacacacgccatcgagattgatctgcaagtgcagattacgtaagcgagaaaggatttgcaatggaattcacaaatcgcacaatcagagaacaggataagtgtactgctaattatgagcgccagggagtgtagattcatgtcttaggttttaaaattagaacagaataaatatgaaaattgttttttactttctatattttatattttaatttttttttagtttttattattagtaatattgttaattataattaattataaaaattttaacaagtaatttattactaatttatcataagataatttataataaaaaaataattgataatttataattaatttataactaattatttttatattttgtttagtaaagactaaaaggtaattaaaatgtaaattatagagattaaaatatcatttttaaactataagaactaaaaaagaattaaaatacaaactataagacaaaaaagatcacttttaaactataggaactaaaaaaattacttttaaattatatggactaaaaaataccaatcgtaaaattataggaactaaataaataatataaccttaaattttttattttaagatcaattttttaaaaaattaatgttaatcatgatattttatttataaaatatcaaaactcattttgtaaaatggattttcatcaaaataaacgttcactttgctatggtaaatcttgttttgtagtattttggttgttctgacccaaatgacccaaatgcaggctagtggacaatgacattgattgttttgtatatgggttgggtgtcccttgtatcctattgatatattccttttgccttattaagaaaaattgcattagaaactactatatattaaatgctctaacaattaatgattaaattgacaccacatcctgtttgactctccacttttcttttattggtactctctattttagtctgctctttatatacatgttaacttaaagacagcaaatttaccaaagtaacttatcttctctcttgaaagaaaaatgccacagaggaatttagtactattttccacaactatggttgtgctattgctatctagcatagtgctcacacaagcacaaccacgatcatggtcagcattccaagcatccaaagaactagccacaaagcttagtcgtaaccctcaaacctttccacatgcctcaacacatagttcacaaaaccccagtggcaattttcaatccatcttctgttagtgacatcttggccttgatacatttctcaaactctcttcctaacccattccccatagcccctagagggaaagcacactctgttcatggacaagccatgacaaaagatggggtggtgttgaatatgactaacctcaatagcagttttcaaaatgggttaggggttttggtgtctgcttgtgatggaaaaggtccattgatttgttatgctgatgtaggtggtggccaaatgtggatcgatgtcttgcatgcatcccttgaacgtggactcacacctttgtctttgactgattatatgtatgccactgttgggggcacactatctaatgctggcatgggtggcatgtcctttcgatttggacctcagatctctaatgttcttgaattggatgttattacaggtatgactcactcaattttatcaattaattttcttccatactcatctacacgcttgttcgaagtgaaacatttaactgaattttttttatcttggatatcacaattgtgtaatttttcgtctagatttgtgattatgttaattcaatctgtatatcttaataattatattaaagtccctccctccttcaattatctgtcaaatatttaacgaaatatatttatgtgacatttgagaatgttgatgggtttatatgtgttattttagtcgattagattttacgtgtgaagttttagtgtctcccaaattcttattaacattgtgggaaaaaatgagaaaacaatcgcagaactggagtttgattccagattattattattatttagtaattttattattatctatatcataatagtatatttattaactcatttaatatcatatttattacatatatttagtgtaataatagtatatttattacattctttttacatacaaaaagtcagaaagacttaaaagcttctacaaaaagaaatacctgttatatcagctcttaaagaattacatatgaaatcctacgcatttattacacacacacaaatatatatatatatatatacttaaacagaaatatgaattgttattatatttataattagtatttatattaatagaacaatttatagtttatactatggaataaatttttaaatataaatttattatttatattgatatactcatttatagtttttactaagatataagtttataaatataaatttgcacctcttgtgattttgaactggttttttaataaataaaaaataaataaaaagattataaatataaattattattacattaacataataatttacatttattaatttaatactaaatatatatagtaaatgtatcattaaatgaatgtagtaaacatattattaattttcagaaaagttttaatactttttcaccctagaaatatacaaattttttttaattgatataatttttttttgtttatgattcttgtattaatatttaaaccttccgttggagattaacgggtaaaaaatacaaggtttaaacattatataagtaaagttttcttacaacgacaaaacaaaactaattaatatatttacagctaatgatgtttgtttaaaaagtgctaattatatttttttgttctagtcaatgttgtatagttacccaacatataatcagtgacggactttttagttgtggggaaatattcattatatatatatatatatatatgaatcggtgctgcatataatacaatatatacaattttacactgaaaactgtatattattaaaatttatcaggaattatgcttaaatatcttattgtatctatcttattaaagaaatctaattatatctataaaataaaggtttatttcgatcgttttgatatattgtaaatattattttttttgtttgtttttctcgtataaactttaatacatctatatatgtggcttttatatatagggaaaggagaccttgtgacttgctccaaggagcagaactcagaggcattttacgctgctcttggaggattaggtcaatttggggtgataacaagagcaagaatacctctaggacctgcacctactagggcaagtattagtttcccctttcatatagatttcgtaagggtgaaaataaaaataatattttataggactaaaattaaactaatttcatataaacctaaattaaaactcactcaaattatagatgtattaaaatcatatttaatctatatatatgccatttaattttaattgaaacatacatattatatatagatcattttttcctgtaaacttagtcttagacactatacaacttcaatactattaaaattgtaccaaaattaactatcttaaaactaaaaatgagaataagtcgggtaattgacataagtctatgagctcacttgtttaaagcttggtctcatctatctaataaaaaaagttaaacttaaactttttaaaaagtctatttatttatataatttagacttggacttgtgaaaaaacttattaaactgtatagaccggtctaattattcatttaaatatagtaaaacattaaaatatattatacttttattttaatatcttaatatgttaatatatttttatcataaataaaatgaatatttgaaataaatagatctttaaatatgtaataagctaaactatatcatatcttaatttttataacatgccatacctatatatttatataacgtctaacttgacctaacatattatcacccctacttaaaaattatttatctatttatttttaacaaagtttttttcatgtgggtgtttgcaggtaaaatggctccgcctgctatacaacaacttcactgcattttcaagagaccaagaacatttaatatcgttcagtgaaaggaatgacattgctacagcagattatgtagaaggcatgcttctattgaatcagccgccactggatcttctcttttatccagcttctgatcatcaaagggtaacttccttggtaactcaatatggcattatctacatcttggagcttgccaaatactattacaataactctcaggcacatgtcaatgaggtaacttgaaataaaagttgtttttagcatctagttagaaacttcttttatttttattcttatttttttatggacaacatatataatgaatttagtaaagaaatacagagatattctaattgttatatattcatcatacatcaaagatcaaattaatcctcctgattgaaaagaattttgttttcatgaatccaaaagaaacatgtctcaaactcactcaaattgtatggaacccatatattaattaatttatgtacaattcattgttttttactaaattgattatttttcttgtttcttaaataggaagttgcatatttgctgaaagggttaaactttgtacatacatttgtgttcgaaagagatgtgtcatacgaggagtttgtgaacagagtttatcctttggagcaaatgcttaggtcagaaggactttgggaagttcctcacccttggctgaacctctgggttccaagatctagaatctcagattttgatgaaggtgttttcaaggacattgttcttaagcaaaatattactggcggaagttttctagtctacccaacaaacagaagaaacaagtaaattgattagattatttatttttttgtgagtgtcaaattattatctagatcacccgtctcctttaatttacatatcctttctagtgtttccaatatataaaaaaatgacacctcactaaaaaaaataacaaataagagaatttattgttttttaaccacatttttttattgagagaaaacactccacaagaaaaataataataacaacaaaataatttatgtaatttttaaaagaaaaggtcacttaaatttttgcaactctaaaattagttattgaaaaaaaaaacctcaagtctcacatttactagaggaacctcctaagttttttctaaaatgaatatatttctaaaggatatgagacttaaagttttttcaatattaatttacaacattgtgctctgattcaaagtcaagcaatctcctagaataaaagagattgaaaatagcactaacactattggtggggtttgtggtttgtggtctgtggatttaaatttggcatgtggtatttaacagaacttcaacagaggtataaattataaaagatttttttttctgagaaaaagaaataaatggaggtatgttattaaaagagggagtatgaataacaactgtcctaataatactccattgggcctgacagtaggagttgggccataacaattagggacaaaaaataattttggttactaaatttagtcaataattccttttcttagtcacattagatgtttctgttccaatttatttgcttatgtaaatgacttaatttatacatatgtgaggattaaattgaatcaacattatgcttcacaggtgggatgataggatgacaccaattacacctgacgaagatgttttctacgttgtagattttttgcgtgttgctaaaacgtttgatgtggtggacaaactacaggttcaaaacaaacagatactgcggttttgtaatgatgctggtattaagatcacagagtatcttatcgggaacaaaactcatcaacaatgggtggaacactttggcccaaaatggaaactttttgcagatagaaaaactgaatttgatcccaaaaaaatattgtcacctggacatgggattttccagtaaataatgtgctaggtttcagtgaaatctctcattttggaaattcatgaaataaaaatgaaattctgtaccagaaaaaaaaaaaaaaacttgttgtgtaattctgtgccaaacatacattgaattggattgaagttattatgcaattttgtacgaaaaaaaacttatgtatttgattattttatgtttttttattaatgttgaatgttcaaatattctcatgactcacgaacaacggcagatctagaagaaaaaaatggtcgtaagatgtgttgatggtatttaaatgaatgcatgtctacttcaaaatttatttgatagactcatttcgtaaaaaaaaaaaatagaaataacctatttaacaatacttgtttggaaaataaatttaaaaataagaaatttggtcgtttttttatatagaaaatagcattgtttttatgatattttaatgcaattcacgattttatgttgttgggtttttaaataaataaaagttacataaaactttagttttaaattttctttgggactgtgaatggagttaaactctaaaaaagatctataattccaaagtcaggttaccatcaaatattgacatatagcaaaaaaaaaaactactcccttgggaaaattatataaaatattaccttgtcaagagacttgcatttatacaaatgatttatttagcaaaattgttgcatcatgatcaaataggacaaacgttgctaaatcaatgtcactaggcattggcacccttacaagttacaagatacctttaagaaatcgaaaactatttttttcaaaccctttgttttgtgaattaactctttatgagctattttatccctctcaatcggaatataaagagatttttccttacatgacactagtggtctgatcctaagtttgagcttgctcgatgataagcaatgattttaagttttgggtgagaatatataaaaacattggttggagcgttttttgtttttatttttaaagaaaataaaaaataagaatgaaaatatatttatttaaaatttagaaaatattttttctgaatatatttttgaaatagaccaaaaactgaaaataataaatcaacattttcagtcttgtttgaaaaggtgaaaacagcgtggtaccttagagtgctttcttcttaatacattttttttaatcttaaaaatttgaaaatgaaaataaaaaataaacgctcaaatcaagctccacctaaatttttctctattgcaaatgttgaaaaaaatggaaaagcaaaagatctcaaagtaaaataaatatattgtcttttgttacattttgtttcaatgattgtggggaataattgaggtaggataagtggtaggaaaaaatatcaagcaacggataatggtaattgttttatataaaggtttaaatatatttttagtcttttaatttaaaattattattattttttagtccttaaaaacaaatatgcaaattttagtaatctaaaattttaaaatctagttttagtcttgttttgttaactctataacagaggttgtctgtgtggaaaatgatgtgcaattttgtggcgatttctttagtgtgaaaattttgttttaaatttaaatcaaacaaaatgtctcgcaaggcaacaataacgttgttgctgctaacaatcttcgtgtggcaaaatcaacagtggagaaaacgactatcaacaatgttagagaagagttgacgaaggaaaatggggaaaataggacaaacccgaacaaaaaaaccacccttgacttg

SEQ ID NO: 143 - DNA, 7394 bp, Artificial Sequence
  Synthetic polynucleotide
ttaaatcggttcaaaattgttgaatcgatccaaaactagtaaatacagtaggttaattgatttcacttgaaatttaaaaaaaaaaaattaaaatgacgtcattttagtttttttttaaattattataacttatatgacatttttaagtgaagtttactttttattattattaatttatgcatactaggtttctgaaatattatattaaaatattatatatatatatatatatatatatatatatatatatatatatatatatatatatatatatatattattaaaatcaattccacttcgattgagctattaacttttgaaccaatatcttccccagttcaatgaccatccaagtctgaaaacattggttaccatcaacgttacccttccgtgaattggaaaagttaatgcaatataggttgatccaaggataagtcctatggtcccagaaagaaaatcttgagagatccttttgataattacccgagtttttactctctccttttaattcacgaaattggaaacttcaattgctaatataaaaagaattttgttagccaatatcatcagggtattgtcaaagaattacaagaaaaaaaaattataagataacataaaaaaataaaaaacaacataattttatatattttaataaaaaattcttttaatttttttttatcaatattctatagttactggcatttgacatgtaaaaatgtaaacatatgaattgataaaatttgaccaatgtttgaccctgagataggaatccaacggccccagttcaattgcaatcttttatttttactacgtgaaggcccaacaatggagaaccttgtggattttattgctgagaatctgtggttacgatgatgacacaccaacacaatcacagaaagcaagtaccgtttggaaggcctaacacttcattaattgcttcattaaatttattttactttctagctgctcaatttaattgctttacacaaatacttcatgacgtttcagaaggagggccaaatacaatctctacaatggttccatcgtatctttgaatttgacatttagcatccctccctttgcacaatgtacaatttgcattttgaatatttttttctcaccttcatatcgtgggactacttctataaccatcctggtgaaaataaataaagcgagggaattacgtaattaaacatatttaaatttctctctcctctgtttaattaatttatcaaaaacaaatatgtgtgcgagtatttaaaaatgtgtaaagtattattattttttaatttttcttttttccttctcatcaatgataaatatactttttaatataaaaatcaaacaataactataaaaaaaacatcttcacttcaattcaacattaaataaaaaataatccctgctttgttattttttacccaccaattatcatatttgttatttattatttttttatgttcttgctataaaggaaatcactatttgactcacacaaaactataaaggaatcaaataatcaattattatttaaaaactctattaaaataacaattacaacaaaatcccttatttttttcttccttatcattattaaaccttcccattctctctttctatctctacatgtttttctcaaattaaatattttctatatcctcctttatcatgcaaattaaagtcctcttccattctatatatagccgctacctcctccacctcctttccccactacaacacacaaacaccaacaaccaaatcaatccatccaccctagaaacaacaaagcactctctcttctctcattctattatcttctctcatcctcttattctctccaaaccaacaaaaaaaaaatggttgctgagaactacccttctcccacatacttcatccttcataaccataacacgtttgatctccacagtgggcaaaacctcccaatggacgaaggccctgtcgctgcctccggaactcgcctccgtctccctcgacgacaccatcttctgcaagctccgtgacgacccagaggccctccagggaagggcctccagggactacgggaacctcgtccgcgaggttcccttggcagtcttccacccagcctcagcgagcgacatcgcgaggctgatcaagctgtcgtacaacggctctgtccccttcaagattgcggcgagggggcaagggcactcgacaaggggccaggcgatggcacgtgagggggtggtggtggacatggcggggttcagagagagagggaatggagtggggataagggttgtgagtagtgtggaccctaataataagaatggttactactattatgcggatgttggaggggaacagttgtggatcgatgtgctacacgccacgctcgagcatggacttgcacctatgtcctggactgattacttgtacttgacgctgggagggactctctccaatgctggcatcagtggccagacattccgctatggtcctcaaatcaccactgtccgggaaatggacgtaatcaccggtaagaaaactttccattcaaccagttaacttacatgtttttagttttttagcttccaatatccaatagtttataacttgtaagcttcaattttatgttaatttataagctagttttaccctacttttgaaaattcaaggattttggtactacaataactcccttgtcaaactcgttcaattgttggcttagtatcaagtagactcttggatttttaggtgtactttaacaaccatgttaatttaattgatcagggttttaatattatggaaattggccattggacaacttggaatggaaggaaagcgggagatggaaagggaaaagaaattaattagaataattgttaatattagttgcgtgaaaaaaattaaatttgctgaattaaattatggttcatcacgactctatttgtggcaacaccaacgtgccgttttcagaacttcattgcaacagcggttatagtggcgtttattcaattcatattttaatgcatcagactgtgattgcgattgaaattttatgaaatcttgttttataaacttgttcttttgattaggaaacttgattctattttatatatatttaatgtaacgccgaattaatggttgataaacgagtctttgtctaaaattttggcgaatgttagcaagcgttttccacgtggtcccgtacgtgtttgaaaaattcttaatcatggaatcagttcacacgggcagtcatagactcatagactccaattcttgattaattgttttcttattaatattggtccatggtcttattttggtcaattctttttattaaaaataaacgggctgctgaattttaatttactcaagtgtttgttaatgaatatgtgtgcatgcatgcaattatatatatatatatatattactattatttatttgtgttttaatcaaattttggtttggttcaggaaagggagaatttgtgacttgctctcagcagacgaattcggagttgtttcacgcggttcttggaggcttaggacaatttggaattataacaagggcaagaattgctcttgcgccagctccgaagagggtacgtttaaaatcttcggaattgactaggacttgtcttgttgcttcttcctccaacatctctcatatagtaacgcaaatttctaaatatgttacattattaattcaaccaccaagctttgcggaagcatcaaatgtcgttgtcctgaaagcttcatgtcatcatttttcttggcacccatatacacacacatacgtttcacattgtgtcagtgcatattagtcatccatgaaagacacatgtacaaatgaaaacgagaggagttatattaaaatgtgtgttggaaaaatatatatcatattttcataagtcttaattttgaaattaatatacagtaaccctttgagaccttagcaattaagccaataaaaaggctcgtattaaccccaaccaacaactattagaaaatactaacaagtataggtgtatacataaatgattcatttgaattttagtaccttaattatttaactttatccttctatttgacgggactcgttgcataagccatacatacataatcatgcgttcattattgtttttcattatgagttaatgagttgattgtatgaactaatggtgaatttttgttggcaggttaaatgggtgagacttttgtacaatgacttttctgcttttaccaaagaccaggaacaactaatatctatcactggaaggaaacaaaatgtttcactggattatttggaaggattgctgctaatgcaccaaggacccataaataattggagatcttctttcttccctttagccgaccatgcccgaataatttcgctagtaactaaacacagcgtcctctattgcctagaagttgccaaatattatgatggccaaaatgaaaacaatgtggacaaggtaccatctccattcatgtgcatttgccttgatgatgtttcttctattttttcttttaatgttttgatctcaccttatataataaccctttatcacactcaatcttgttatatttttaagagtttaatgataatattatgattttgttgtgaaaaaagagagtttaattgttattatataatcacaaattatcattaatatgacttttaaaataattaataatataaaaattaataaatttatcgtatttaatgagttataattaaatgatcatataaaattattttatattattaacatatagtttttttttctatttttaatatttgttttactataagttgttatattttcaatcttttttctagtataagttttaataatcaatattgtaagtaatattctcatttttcatgttgtgtaggaactccaagttttactacaaggattgagctatatccctggattttactatgaaaaagatgtctcatattttgagttcttgaatagagtccgaagtggagagttgaagctacagtcacaaggactatgggatgttcctcacccgtggcttaatttgtttataccgaaatctcaaatcatggaatttgactcgggcgtgttcaagaatatcatccttaaacgaaacatcaccacaggacctgtcttggtttaccccatgaatagaaacaagtaattgagcttaactaactaatctcaacttatgttgttatcattaggaaaaatgttaattggtacgaaaactatatataccactattttcatttaaattcatgaaagtgaaatttctctttcctaaaacaaattctttctcttaaaatgaatttttgtttttctcaatctccatcaattacttatttccttttttgaatgtttgaaaagtcattcacaacattttcttcataaaagggttattcgtaccaatttaaatagaattgccgttattatcagatgtacaattcttctcttcactcacttcttttccattaaaattgtaaaaaaaaaataaaaaaatcaggtgggacaataggatgtcagcatcaatacccgatgaggatatcttctacacagttggatttttgcattcaagtgggtttgataattggaaggcctatgatgctcaaaataaagaaattctacaattttgtaacgttgctgggatcaaggttaagcaatatcttccccactatcgcacacaagaagattgggcaaaccattttggccctaaatggaggacttttgtagaaagaaaacaccagtttgatccaagaatgattctatcacctggacaaagaatctttaacaattaaaatagctttaaaaatatatattcccccccccccccccccccccaaaaaaaaaaaaattatataatatggtgggactacccaagttagctagctggctgatcacaagtgtgcacataggacccagaattcagatgatagcctttgtacttgtttttgttaagagggtggggttaaaagctgcatgactttggcatatatgtagatcaggttacacatactttagatacgttaggttgacaaaatcatgtgtgaaataagatgcacacagctagctgtgtacctttctttctctctgtccctcaatttgtctatcactaaaaagatttctatatagtttagaacctagtgaagagaaagaaaaaaccattatattgaggatttaattttatcacgttctaatcctatacattaatattcttaaatgtgcaatgagtgtgctcggtgccttaatgattctttatctttgttaattgttatattgtagggttttgtttttgccttcctaattttgtaacaggggcacccctagcaataattgagatcctaggttaactaaggaacagcattattgtgtctaaattgagattcctagctgtatgccataataataaatcatcgtaggttgctagatagatgtgatagcgccaaatgccttccaatactataatctccattgcaagatccttcgttgtgattgtgtagaaaagattacgctgctttacaagagaatactccaagaaagcaagtgattgctccttaatataaagaatcatgcaataaacaaatggtgtcgtaatccataaagtgtatttaatatttgatgaaagagtagtgtagacatcaaacaaaataaagtttgatgcaattcgaattatagatacttgattaatctctaaattatgttgagacaatcatatttgaatttgataagactattatgaacgataaaaaatattataaataataaaaaaatttcatcaaacatttaatacaattatataccttactcaaatttgaaaacctgtacatataggaaaaaaacctttactaaaagaggttaaactcaccatacggatttttatatgtcgaagggatctttaattgtccatcggaaaacatcctaattcataaaaaaggaaagaaagtttagacatgaataattacggaccaatgaatgcaacctacgtctctcaattttaaggagaatttaggaatattatagtatatcactgaaagtacacacaagtggcaatgatgaatattttaatttaaagttttaattggattcgaaattaatcccttcttttttccagaaaaaataataatcatcgagtaatcaagacaatttcccaagtagacaacaagaatacaaaagagaatacgtgacttcgtttcaccatagaaaagaaggaatgcaataacgatgataataattataaaatgaaattgacaaaatatctaaatgcctgtagatatttctacagcgaatgataagtgtttttccattaaaaataagtttcttttgttaagaatttctaacatttttagttccaaaatataggaatgaagccaataagtaagtaagaatttctaacgtctgaaag

SEQ ID NO: 144 - DNA, 7370 bp, Artificial Sequence
  Synthetic polynucleotide
ttaaatcggttcaaaattgttgaatcgatccaaaactagtaaatacagtaggttaattgatttcacttgaaatttaaaaaaaaaaaattaaaatgacgtcattttagtttttttttaaattattataacttatatgacatttttaagtgaagtttactttttattattattaatttatgcatactaggtttctgaaatattatattaaaatattatatatatatatatatatatatatatatatatatatatatatatatatatatatatatatatattattaaaatcaattccacttcgattgagctattaacttttgaaccaatatcttccccagttcaatgaccatccaagtctgaaaacattggttaccatcaacgttacccttccgtgaattggaaaagttaatgcaatataggttgatccaaggataagtcctatggtcccagaaagaaaatcttgagagatccttttgataattacccgagtttttactctctccttttaattcacgaaattggaaacttcaattgctaatataaaaagaattttgttagccaatatcatcagggtattgtcaaagaattacaagaaaaaaaaattataagataacataaaaaaataaaaaacaacataattttatatattttaataaaaaattcttttaatttttttttatcaatattctatagttactggcatttgacatgtaaaaatgtaaacatatgaattgataaaatttgaccaatgtttgaccctgagataggaatccaacggccccagttcaattgcaatcttttatttttactacgtgaaggcccaacaatggagaaccttgtggattttattgctgagaatctgtggttacgatgatgacacaccaacacaatcacagaaagcaagtaccgtttggaaggcctaacacttcattaattgcttcattaaatttattttactttctagctgctcaatttaattgctttacacaaatacttcatgacgtttcagaaggagggccaaatacaatctctacaatggttccatcgtatctttgaatttgacatttagcatccctccctttgcacaatgtacaatttgcattttgaatatttttttctcaccttcatatcgtgggactacttctataaccatcctggtgaaaataaataaagcgagggaattacgtaattaaacatatttaaatttctctctcctctgtttaattaatttatcaaaaacaaatatgtgtgcgagtatttaaaaatgtgtaaagtattattattttttaatttttcttttttccttctcatcaatgataaatatactttttaatataaaaatcaaacaataactataaaaaaaacatcttcacttcaattcaacattaaataaaaaataatccctgctttgttattttttacccaccaattatcatatttgttatttattatttttttatgttcttgctataaaggaaatcactatttgactcacacaaaactataaaggaatcaaataatcaattattatttaaaaactctattaaaataacaattacaacaaaatcccttatttttttcttccttatcattattaaaccttcccattctctctttctatctctacatgtttttctcaaattaaatattttctatatcctcctttatcatgcaaattaaagtcctcttccattctatatatagccgctacctcctccacctcctttccccactacaacacacaaacaccaacaaccaaatcaatccatccaccctagaaacaacaaagcactctctcttctctcattctattatcttctctcatcctcttattctctccaaaccaacaaaaaaaaaatggttgctgagaactacccttctcccacatagtttgatctccacagtgggcaaaacctcccaatggacgaaggccctgtcgctgcctccggaactcgcctccgtctccctcgacgacaccatcttctgcaagctccgtgacgacccagaggccctccagggaagggcctccagggactacgggaacctcgtccgcgaggttcccttggcagtcttccacccagcctcagcgagcgacatcgcgaggctgatcaagctgtcgtacaacggctctgtccccttcaagattgcggcgagggggcaagggcactcgacaaggggccaggcgatggcacgtgagggggtggtggtggacatggcggggttcagagagagagggaatggagtggggataagggttgtgagtagtgtggaccctaataataagaatggttactactattatgcggatgttggaggggaacagttgtggatcgatgtgctacacgccacgctcgagcatggacttgcacctatgtcctggactgattacttgtacttgacgctgggagggactctctccaatgctggcatcagtggccagacattccgctatggtcctcaaatcaccactgtccgggaaatggacgtaatcaccggtaagaaaactttccattcaaccagttaacttacatgtttttagttttttagcttccaatatccaatagtttataacttgtaagcttcaattttatgttaatttataagctagttttaccctacttttgaaaattcaaggattttggtactacaataactcccttgtcaaactcgttcaattgttggcttagtatcaagtagactcttggatttttaggtgtactttaacaaccatgttaatttaattgatcagggttttaatattatggaaattggccattggacaacttggaatggaaggaaagcgggagatggaaagggaaaagaaattaattagaataattgttaatattagttgcgtgaaaaaaattaaatttgctgaattaaattatggttcatcacgactctatttgtggcaacaccaacgtgccgttttcagaacttcattgcaacagcggttatagtggcgtttattcaattcatattttaatgcatcagactgtgattgcgattgaaattttatgaaatcttgttttataaacttgttcttttgattaggaaacttgattctattttatatatatttaatgtaacgccgaattaatggttgataaacgagtctttgtctaaaattttggcgaatgttagcaagcgttttccacgtggtcccgtacgtgtttgaaaaattcttaatcatggaatcagttcacacgggcagtcatagactcatagactccaattcttgattaattgttttcttattaatattggtccatggtcttattttggtcaattctttttattaaaaataaacgggctgctgaattttaatttactcaagtgtttgttaatgaatatgtgtgcatgcatgcaattatatatatatatatatattactattatttatttgtgttttaatcaaattttggtttggttcaggaaagggagaatttgtgacttgctctcagcagacgaattcggagttgtttcacgcggttcttggaggcttaggacaatttggaattataacaagggcaagaattgctcttgcgccagctccgaagagggtacgtttaaaatcttcggaattgactaggacttgtcttgttgcttcttcctccaacatctctcatatagtaacgcaaatttctaaatatgttacattattaattcaaccaccaagctttgcggaagcatcaaatgtcgttgtcctgaaagcttcatgtcatcatttttcttggcacccatatacacacacatacgtttcacattgtgtcagtgcatattagtcatccatgaaagacacatgtacaaatgaaaacgagaggagttatattaaaatgtgtgttggaaaaatatatatcatattttcataagtcttaattttgaaattaatatacagtaaccctttgagaccttagcaattaagccaataaaaaggctcgtattaaccccaaccaacaactattagaaaatactaacaagtataggtgtatacataaatgattcatttgaattttagtaccttaattatttaactttatccttctatttgacgggactcgttgcataagccatacatacataatcatgcgttcattattgtttttcattatgagttaatgagttgattgtatgaactaatggtgaatttttgttggcaggttaaatgggtgagacttttgtacaatgacttttctgcttttaccaaagaccaggaacaactaatatctatcactggaaggaaacaaaatgtttcactggattatttggaaggattgctgctaatgcaccaaggacccataaataattggagatcttctttcttccctttagccgaccatgcccgaataatttcgctagtaactaaacacagcgtcctctattgcctagaagttgccaaatattatgatggccaaaatgaaaacaatgtggacaaggtaccatctccattcatgtgcatttgccttgatgatgtttcttctattttttcttttaatgttttgatctcaccttatataataaccctttatcacactcaatcttgttatatttttaagagtttaatgataatattatgattttgttgtgaaaaaagagagtttaattgttattatataatcacaaattatcattaatatgacttttaaaataattaataatataaaaattaataaatttatcgtatttaatgagttataattaaatgatcatataaaattattttatattattaacatatagtttttttttctatttttaatatttgttttactataagttgttatattttcaatcttttttctagtataagttttaataatcaatattgtaagtaatattctcatttttcatgttgtgtaggaactccaagttttactacaaggattgagctatatccctggattttactatgaaaaagatgtctcatattttgagttcttgaatagagtccgaagtggagagttgaagctacagtcacaaggactatgggatgttcctcacccgtggcttaatttgtttataccgaaatctcaaatcatggaatttgactcgggcgtgttcaagaatatcatccttaaacgaaacatcaccacaggacctgtcttggtttaccccatgaatagaaacaagtaattgagcttaactaactaatctcaacttatgttgttatcattaggaaaaatgttaattggtacgaaaactatatataccactattttcatttaaattcatgaaagtgaaatttctctttcctaaaacaaattctttctcttaaaatgaatttttgtttttctcaatctccatcaattacttatttccttttttgaatgtttgaaaagtcattcacaacattttcttcataaaagggttattcgtaccaatttaaatagaattgccgttattatcagatgtacaattcttctcttcactcacttcttttccattaaaattgtaaaaaaaaaataaaaaaatcaggtgggacaataggatgtcagcatcaatacccgatgaggatatcttctacacagttggatttttgcattcaagtgggtttgataattggaaggcctatgatgctcaaaataaagaaattctacaattttgtaacgttgctgggatcaaggttaagcaatatcttccccactatcgcacacaagaagattgggcaaaccattttggccctaaatggaggacttttgtagaaagaaaacaccagtttgatccaagaatgattctatcacctggacaaagaatctttaacaattaaaatagctttaaaaatatatattcccccccccccccccccccccaaaaaaaaaaaaattatataatatggtgggactacccaagttagctagctggctgatcacaagtgtgcacataggacccagaattcagatgatagcctttgtacttgtttttgttaagagggtggggttaaaagctgcatgactttggcatatatgtagatcaggttacacatactttagatacgttaggttgacaaaatcatgtgtgaaataagatgcacacagctagctgtgtacctttctttctctctgtccctcaatttgtctatcactaaaaagatttctatatagtttagaacctagtgaagagaaagaaaaaaccattatattgaggatttaattttatcacgttctaatcctatacattaatattcttaaatgtgcaatgagtgtgctcggtgccttaatgattctttatctttgttaattgttatattgtagggttttgtttttgccttcctaattttgtaacaggggcacccctagcaataattgagatcctaggttaactaaggaacagcattattgtgtctaaattgagattcctagctgtatgccataataataaatcatcgtaggttgctagatagatgtgatagcgccaaatgccttccaatactataatctccattgcaagatccttcgttgtgattgtgtagaaaagattacgctgctttacaagagaatactccaagaaagcaagtgattgctccttaatataaagaatcatgcaataaacaaatggtgtcgtaatccataaagtgtatttaatatttgatgaaagagtagtgtagacatcaaacaaaataaagtttgatgcaattcgaattatagatacttgattaatctctaaattatgttgagacaatcatatttgaatttgataagactattatgaacgataaaaaatattataaataataaaaaaatttcatcaaacatttaatacaattatataccttactcaaatttgaaaacctgtacatataggaaaaaaacctttactaaaagaggttaaactcaccatacggatttttatatgtcgaagggatctttaattgtccatcggaaaacatcctaattcataaaaaaggaaagaaagtttagacatgaataattacggaccaatgaatgcaacctacgtctctcaattttaaggagaatttaggaatattatagtatatcactgaaagtacacacaagtggcaatgatgaatattttaatttaaagttttaattggattcgaaattaatcccttcttttttccagaaaaaataataatcatcgagtaatcaagacaatttcccaagtagacaacaagaatacaaaagagaatacgtgacttcgtttcaccatagaaaagaaggaatgcaataacgatgataataattataaaatgaaattgacaaaatatctaaatgcctgtagatatttctacagcgaatgataagtgtttttccattaaaaataagtttcttttgttaagaatttctaacatttttagttccaaaatataggaatgaagccaataagtaagtaagaatttctaacgtctgaaag

SEQ ID NO: 145 - DNA, 3584 bp, Artificial Sequence
  Synthetic polynucleotide
cttctcatccaatctaatagcaggatacgcgatgtttacattccgacaatagtggactcagtaccaacaccataaaaaaaaataaacaactagttatgtgtccataggggcaaaagaaaaagaaatacgcactactgtggaaagaagaaaaaaagcaataaggacttatttctatatccggaaaaagcatatatccttaaattggttaatgaacaaaaacttgaaacatgtctttccttcatgtttttgttgtaacttataacataacatgtaattgtttgtggttaccactgtttggaaaaagttgaagatttgtgagatctctcattgatgttacttttcctcttcaacttggcttctgtgtcactgtacatgtgatgcctttggcgtctctcttccttccaagtaagcagtccacatacgcattctcctcgtatcgtatgtcataagtcatgactgatcaacaatgctacgttgaccaagccaccacccacaaactcctttaaattctggcccaaacccttaagttcctgcattctccaatccatcactttctccttttcctcgtgttcacaaaatcacgctgcttaattattccttcaactaccatcatatcataccttctcaacagaaaaataaaaataaaaatgagatacatccttggagaacacaacattctgttcctcaaaagcttcgccttcacgatattattccttagttgcatagccattcggcttaacttgtgtctttccagcatcccttcttcactgaaatcaatataatccaatggcagtgctgcaaccagaatcagtttctgatattgtagccaccataaggcatatctggctgatgggtcctggctcccacctcaccattgcagcgaggggccacggccactcgctgcagggtcaggctcaagcccatggaggacttgtgatcaacatggaatcactcaaggtcccagaaatgcaggtatatcgctaaatattaattgttaatcgttaattttttgttagctaggcaatcaaatccacaatcttttcctctcttccttcttcttatacaaccaaactaaccttataactccaatgcagatacatgttgatgagggaaacaagtctcctccatacgtggatgtctcaggtggcgagttgtggataaacatattgcatgagactctaagatacggcttggcgccaagatcgtggacagactacctgcatctcacagttggtggcactctctccaacgctggtgtcagtggtcagacatttaggcatggtccccagataagtaatgtacagcagctcgagattgttacaggtttgtgaaaaagagaatgaataataattgtttgtcttttctgaataataattcatttgatactggctgcatataagttttctaataaataatttttttcccctactttgatgagtaaaacatggtcaatgaatggatgcaggaacaggggaggtgttgaactgttccgcggagaataatggggatctctttcatggtgttctagggggcttggccaatttggcattataacccgggcaagaattgtcctagaaccagcacctaccatggtaatgcatcactcatcagtgactataccaaaacaagcttctttttttttggttttaatgtgtgctttgggtcatgactgaaaattttctatttattggaacaggtaaaatggattagagtgctgtactcagatttcacagcattcacaagagaccaagagaggttaatatctgcagaaaagacttttgactacattgaaggatttgtgataataaacagaactggtcttctaaataactggcgattatccttcaacccacgagacccggtccaagctagtcatttcaagtcggatggaagaactctcttctgccttgaaatggccaaatacttaaacgtggaagaaatcgatgcagcaaatcaggtgaggccagcaacactcaatctaatagatttttttgaaaataaagggataattaactccaaggttttaaaatatgagaccgtgggttgcaacatcaaagttttctaactctttgcgacccgaattgagactatgtcgatagcatttgtctatgatttgcccgtgatatcaacaaacacgaccaaaccacatgcgactgcgacctatatttaaaaccttgattaactcattagtgataatctttctttaggaaagaaaataaaagaggctaaatcaaccgtatctcacttttgtgtgtgcaggaagttgaggaacatttgtcccgtttaagctacatcccatcaactcttttttcaacagaagtcacatttgtagatttcttagacagggtgcacatatccgaggtcaagttgcgttcaaaaggcttgtgggatgttccacatccatggctcaatcttctaatacccaaaagccaaatactcaactttgcacaagtcgtcttcgggaacatcctatcagaaactagcaacggccccgtccttatctacccagtaaacaaatcaaagtaatgaatggttcagaaaaaaacatactattaactctagaaacaaatattttagccgtcaatattttttaattgacatgttttgttttgtttgcaggtgggacaacagaacttctgttgtgattccagaggaagatattttctacttagtggcatttcttacatctgcagttccatcttcaaatggaactgatggcctagaacacatactaagtcagaacaaaagaatattagaattctgtgaaagagcacaacttggagtgaagcagtatttgccccactacaacacacagcaagaatggagggcccattttggtcctcaatgggagacttttctgctgagaaagtccgtttatgatccattagcaatactcgcccctggccaacgtatatttcaaaaagcaataaccttctcatgaccacatttttattattaattattaaaaatctgaaaaaaaaaaagagaagaaaagtccttcatggcatgtgccaaaatgaaaaaaaaatgttatatgatccagacaggttttgacattgaccatacagaatgcaattgcaaaggaagaaggttcattgatagtagagaaaaagagggagaaaaagagattacaaaatgatgactggtgagatttgtatgccttgcaggttaatgaggaaagttgtcagtgtatgtaggtatgtaccattactgatggaaaaattgccttacgtgctgagtgtagcaccaaggcagcagggtccggctgagattagatcaacaaaacacattaatcattgtagggtttccaaagaacttataaatattatcagcgctagagccaatgtatagtactatcaattttgtaaacactcccttatttgttctctgtctcacatgtatccaaattcattaagattataattaaatacagatatttatgcatccaccacaaaaagatatcaatacgttcgcaacaaatacagataagatgatatataatgctgagtaacaaatactactattctagaaaattgcggaaaatgatataaaaatgggtatgcctaccctgaaggatgatgaat

SEQ ID NO: 146 - DNA, 8075 bp, Artificial Sequence
  Synthetic polynucleotide
ctacttctagaatgacaactactcctatggcaatatcaattgttagcggtggttcccttaagttcgagactaagggcagtctccaaaaggaagaaaggaaataacaaacttaagcctgaatgttctacgttttatttagtgtctcttgatatttaaaggtctatcaaatatgtataataaccgcacttccactataataaccacactcccactacgataatcgctacaataaccaccacaataactacttctaggatgacaactacctctatataagtttccatgacagaacatcttcttcctaacaccttacctatcacaaatgcttctcctctcggtgtcagagagtactattgattccctaagttctgacggtgtctttttctaaccaaagatccacttttcgaaggtcccgagccaattcgatgagagctcggaggcatagaactcggtttagtcacttatgccatgcttcatttcgtcgcgcgtactttaccaatcaacacacgccatcgagattgatctgcaagtgcagattacgtaagcgagaaaggatttgcaatggaattcacaaatcgcacaatcagagaacaggataagtgtactgctaattatgagcgccagggagtgtagattcatgtcttaggttttaaaattagaacagaataaatatgaaaattgttttttactttctatattttatattttaatttttttttagtttttattattagtaatattgttaattataattaattataaaaattttaacaagtaatttattactaatttatcataagataatttataataaaaaaataattgataatttataattaatttataactaattatttttatattttgtttagtaaagactaaaaggtaattaaaatgtaaattatagagattaaaatatcatttttaaactataagaactaaaaaagaattaaaatacaaactataagacaaaaaagatcacttttaaactataggaactaaaaaaattacttttaaattatatggactaaaaaataccaatcgtaaaattataggaactaaataaataatataaccttaaattttttattttaagatcaattttttaaaaaattaatgttaatcatgatattttatttataaaatatcaaaactcattttgtaaaatggattttcatcaaaataaacgttcactttgctatggtaaatcttgttttgtagtattttggttgttctgacccaaatgacccaaatgcaggctagtggacaatgacattgattgttttgtatatgggttgggtgtcccttgtatcctattgatatattccttttgccttattaagaaaaattgcattagaaactactatatattaaatgctctaacaattaatgattaaattgacaccacatcctgtttgactctccacttttcttttattggtactctctattttagtctgctctttatatacatgttaacttaaagacagcaaatttaccaaagtaacttatcttctctcttgaaagaaaaatgccacagaggaatttagtactattttccacaactatggttgtgctattgctatctagcatagtgctcacacaagcatagcccctagagggaaagcacactctgttcatggacaagccatgacaaaagatggggtggtgttgaatatgactaacctcaatagcagttttcaaaatgggttaggggttttggtgtctgcttgtgatggaaaaggtccattgatttgttatgctgatgtaggtggtggccaaatgtggatcgatgtcttgcatgcatcccttgaacgtggactcacacctttgtctttgactgattatatgtatgccactgttgggggcacactatctaatgctggcatgggtggcatgtcctttcgatttggacctcagatctctaatgttcttgaattggatgttattacaggtatgactcactcaattttatcaattaattttcttccatactcatctacacgcttgttcgaagtgaaacatttaactgaattttttttatcttggatatcacaattgtgtaatttttcgtctagatttgtgattatgttaattcaatctgtatatcttaataattatattaaagtccctccctccttcaattatctgtcaaatatttaacgaaatatatttatgtgacatttgagaatgttgatgggtttatatgtgttattttagtcgattagattttacgtgtgaagttttagtgtctcccaaattcttattaacattgtgggaaaaaatgagaaaacaatcgcagaactggagtttgattccagattattattattatttagtaattttattattatctatatcataatagtatatttattaactcatttaatatcatatttattacatatatttagtgtaataatagtatatttattacattctttttacatacaaaaagtcagaaagacttaaaagcttctacaaaaagaaatacctgttatatcagctcttaaagaattacatatgaaatcctacgcatttattacacacacacaaatatatatatatatatatacttaaacagaaatatgaattgttattatatttataattagtatttatattaatagaacaatttatagtttatactatggaataaatttttaaatataaatttattatttatattgatatactcatttatagtttttactaagatataagtttataaatataaatttgcacctcttgtgattttgaactggttttttaataaataaaaaataaataaaaagattataaatataaattattattacattaacataataatttacatttattaatttaatactaaatatatatagtaaatgtatcattaaatgaatgtagtaaacatattattaattttcagaaaagttttaatactttttcaccctagaaatatacaaattttttttaattgatataatttttttttgtttatgattcttgtattaatatttaaaccttccgttggagattaacgggtaaaaaatacaaggtttaaacattatataagtaaagttttcttacaacgacaaaacaaaactaattaatatatttacagctaatgatgtttgtttaaaaagtgctaattatatttttttgttctagtcaatgttgtatagttacccaacatataatcagtgacggactttttagttgtggggaaatattcattatatatatatatatatatatgaatcggtgctgcatataatacaatatatacaattttacactgaaaactgtatattattaaaatttatcaggaattatgcttaaatatcttattgtatctatcttattaaagaaatctaattatatctataaaataaaggtttatttcgatcgttttgatatattgtaaatattattttttttgtttgtttttctcgtataaactttaatacatctatatatgtggcttttatatatagggaaaggagaccttgtgacttgctccaaggagcagaactcagaggcattttacgctgctcttggaggattaggtcaatttggggtgataacaagagcaagaatacctctaggacctgcacctactagggcaagtattagtttcccctttcatatagatttcgtaagggtgaaaataaaaataatattttataggactaaaattaaactaatttcatataaacctaaattaaaactcactcaaattatagatgtattaaaatcatatttaatctatatatatgccatttaattttaattgaaacatacatattatatatagatcattttttcctgtaaacttagtcttagacactatacaacttcaatactattaaaattgtaccaaaattaactatcttaaaactaaaaatgagaataagtcgggtaattgacataagtctatgagctcacttgtttaaagcttggtctcatctatctaataaaaaaagttaaacttaaactttttaaaaagtctatttatttatataatttagacttggacttgtgaaaaaacttattaaactgtatagaccggtctaattattcatttaaatatagtaaaacattaaaatatattatacttttattttaatatcttaatatgttaatatatttttatcataaataaaatgaatatttgaaataaatagatctttaaatatgtaataagctaaactatatcatatcttaatttttataacatgccatacctatatatttatataacgtctaacttgacctaacatattatcacccctacttaaaaattatttatctatttatttttaacaaagtttttttcatgtgggtgtttgcaggtaaaatggctccgcctgctatacaacaacttcactgcattttcaagagaccaagaacatttaatatcgttcagtgaaaggaatgacattgctacagcagattatgtagaaggcatgcttctattgaatcagccgccactggatcttctcttttatccagcttctgatcatcaaagggtaacttccttggtaactcaatatggcattatctacatcttggagcttgccaaatactattacaataactctcaggcacatgtcaatgaggtaacttgaaataaaagttgtttttagcatctagttagaaacttcttttatttttattcttatttttttatggacaacatatataatgaatttagtaaagaaatacagagatattctaattgttatatattcatcatacatcaaagatcaaattaatcctcctgattgaaaagaattttgttttcatgaatccaaaagaaacatgtctcaaactcactcaaattgtatggaacccatatattaattaatttatgtacaattcattgttttttactaaattgattatttttcttgtttcttaaataggaagttgcatatttgctgaaagggttaaactttgtacatacatttgtgttcgaaagagatgtgtcatacgaggagtttgtgaacagagtttatcctttggagcaaatgcttaggtcagaaggactttgggaagttcctcacccttggctgaacctctgggttccaagatctagaatctcagattttgatgaaggtgttttcaaggacattgttcttaagcaaaatattactggcggaagttttctagtctacccaacaaacagaagaaacaagtaaattgattagattatttatttttttgtgagtgtcaaattattatctagatcacccgtctcctttaatttacatatcctttctagtgtttccaatatataaaaaaatgacacctcactaaaaaaaataacaaataagagaatttattgttttttaaccacatttttttattgagagaaaacactccacaagaaaaataataataacaacaaaataatttatgtaatttttaaaagaaaaggtcacttaaatttttgcaactctaaaattagttattgaaaaaaaaaacctcaagtctcacatttactagaggaacctcctaagttttttctaaaatgaatatatttctaaaggatatgagacttaaagttttttcaatattaatttacaacattgtgctctgattcaaagtcaagcaatctcctagaataaaagagattgaaaatagcactaacactattggtggggtttgtggtttgtggtctgtggatttaaatttggcatgtggtatttaacagaacttcaacagaggtataaattataaaagatttttttttctgagaaaaagaaataaatggaggtatgttattaaaagagggagtatgaataacaactgtcctaataatactccattgggcctgacagtaggagttgggccataacaattagggacaaaaaataattttggttactaaatttagtcaataattccttttcttagtcacattagatgtttctgttccaatttatttgcttatgtaaatgacttaatttatacatatgtgaggattaaattgaatcaacattatgcttcacaggtgggatgataggatgacaccaattacacctgacgaagatgttttctacgttgtagattttttgcgtgttgctaaaacgtttgatgtggtggacaaactacaggttcaaaacaaacagatactgcggttttgtaatgatgctggtattaagatcacagagtatcttatcgggaacaaaactcatcaacaatgggtggaacactttggcccaaaatggaaactttttgcagatagaaaaactgaatttgatcccaaaaaaatattgtcacctggacatgggattttccagtaaataatgtgctaggtttcagtgaaatctctcattttggaaattcatgaaataaaaatgaaattctgtaccagaaaaaaaaaaaaaaacttgttgtgtaattctgtgccaaacatacattgaattggattgaagttattatgcaattttgtacgaaaaaaaacttatgtatttgattattttatgtttttttattaatgttgaatgttcaaatattctcatgactcacgaacaacggcagatctagaagaaaaaaatggtcgtaagatgtgttgatggtatttaaatgaatgcatgtctacttcaaaatttatttgatagactcatttcgtaaaaaaaaaaaatagaaataacctatttaacaatacttgtttggaaaataaatttaaaaataagaaatttggtcgtttttttatatagaaaatagcattgtttttatgatattttaatgcaattcacgattttatgttgttgggtttttaaataaataaaagttacataaaactttagttttaaattttctttgggactgtgaatggagttaaactctaaaaaagatctataattccaaagtcaggttaccatcaaatattgacatatagcaaaaaaaaaaactactcccttgggaaaattatataaaatattaccttgtcaagagacttgcatttatacaaatgatttatttagcaaaattgttgcatcatgatcaaataggacaaacgttgctaaatcaatgtcactaggcattggcacccttacaagttacaagatacctttaagaaatcgaaaactatttttttcaaaccctttgttttgtgaattaactctttatgagctattttatccctctcaatcggaatataaagagatttttccttacatgacactagtggtctgatcctaagtttgagcttgctcgatgataagcaatgattttaagttttgggtgagaatatataaaaacattggttggagcgttttttgtttttatttttaaagaaaataaaaaataagaatgaaaatatatttatttaaaatttagaaaatattttttctgaatatatttttgaaatagaccaaaaactgaaaataataaatcaacattttcagtcttgtttgaaaaggtgaaaacagcgtggtaccttagagtgctttcttcttaatacattttttttaatcttaaaaatttgaaaatgaaaataaaaaataaacgctcaaatcaagctccacctaaatttttctctattgcaaatgttgaaaaaaatggaaaagcaaaagatctcaaagtaaaataaatatattgtcttttgttacattttgtttcaatgattgtggggaataattgaggtaggataagtggtaggaaaaaatatcaagcaacggataatggtaattgttttatataaaggtttaaatatatttttagtcttttaatttaaaattattattattttttagtccttaaaaacaaatatgcaaattttagtaatctaaaattttaaaatctagttttagtcttgttttgttaactctataacagaggttgtctgtgtggaaaatgatgtgcaattttgtggcgatttctttagtgtgaaaattttgttttaaatttaaatcaaacaaaatgtctcgcaaggcaacaataacgttgttgctgctaacaatcttcgtgtggcaaaatcaacagtggagaaaacgactatcaacaatgttagagaagagttgacgaaggaaaatggggaaaataggacaaacccgaacaaaaaaaccacccttgacttg

SEQ ID NO: 147 - DNA, 8271 bp, Artificial Sequence
  Synthetic polynucleotide
ctacttctagaatgacaactactcctatggcaatatcaattgttagcggtggttcccttaagttcgagactaagggcagtctccaaaaggaagaaaggaaataacaaacttaagcctgaatgttctacgttttatttagtgtctcttgatatttaaaggtctatcaaatatgtataataaccgcacttccactataataaccacactcccactacgataatcgctacaataaccaccacaataactacttctaggatgacaactacctctatataagtttccatgacagaacatcttcttcctaacaccttacctatcacaaatgcttctcctctcggtgtcagagagtactattgattccctaagttctgacggtgtctttttctaaccaaagatccacttttcgaaggtcccgagccaattcgatgagagctcggaggcatagaactcggtttagtcacttatgccatgcttcatttcgtcgcgcgtactttaccaatcaacacacgccatcgagattgatctgcaagtgcagattacgtaagcgagaaaggatttgcaatggaattcacaaatcgcacaatcagagaacaggataagtgtactgctaattatgagcgccagggagtgtagattcatgtcttaggttttaaaattagaacagaataaatatgaaaattgttttttactttctatattttatattttaatttttttttagtttttattattagtaatattgttaattataattaattataaaaattttaacaagtaatttattactaatttatcataagataatttataataaaaaaataattgataatttataattaatttataactaattatttttatattttgtttagtaaagactaaaaggtaattaaaatgtaaattatagagattaaaatatcatttttaaactataagaactaaaaaagaattaaaatacaaactataagacaaaaaagatcacttttaaactataggaactaaaaaaattacttttaaattatatggactaaaaaataccaatcgtaaaattataggaactaaataaataatataaccttaaattttttattttaagatcaattttttaaaaaattaatgttaatcatgatattttatttataaaatatcaaaactcattttgtaaaatggattttcatcaaaataaacgttcactttgctatggtaaatcttgttttgtagtattttggttgttctgacccaaatgacccaaatgcaggctagtggacaatgacattgattgttttgtatatgggttgggtgtcccttgtatcctattgatatattccttttgccttattaagaaaaattgcattagaaactactatatattaaatgctctaacaattaatgattaaattgacaccacatcctgtttgactctccacttttcttttattggtactctctattttagtctgctctttatatacatgttaacttaaagacagcaaatttaccaaagtaacttatcttctctcttgaaagaaaaatgccacagaggaatttagtactattttccacaactatggttgtgctatctagcatagtgctcacacaagcacaaccacgatcatggtcagcattccaagcatccaaagaactagccacaaagcttagtcgtaaccctcaaacctttccacatgcctcaaccgattatgggcacatagttcacaaaaccccagtggcaattttcaatccatcttctgttagtgacatcttggccttgatacatttctcaaactctcttcctaacccattccccatagcccctagagggaaagcacactctgttcatggacaagccatgacaaaagatggggtggtgttgaatatgactaacctcaatagcagttttcaaaatgggttaggggttttggtgtctgcttgtgatggaaaaggtccattgatttgttatgctgatgtaggtggtggccaaatgtggatcgatgtcttgcatgcatcccttgaacgtggactcacacctttgtctttgactgattatatgtatgccactgttgggggcacactatctaatgctggcatgggtggcatgtcctttcgatttggacctcagatctctaatgttcttgaattggatgttattacaggtatgactcactcaattttatcaattaattttcttccatactcatctacacgcttgttcgaagtgaaacatttaactgaattttttttatcttggatatcacaattgtgtaatttttcgtctagatttgtgattatgttaattcaatctgtatatcttaataattatattaaagtccctccctccttcaattatctgtcaaatatttaacgaaatatatttatgtgacatttgagaatgttgatgggtttatatgtgttattttagtcgattagattttacgtgtgaagttttagtgtctcccaaattcttattaacattgtgggaaaaaatgagaaaacaatcgcagaactggagtttgattccagattattattattatttagtaattttattattatctatatcataatagtatatttattaactcatttaatatcatatttattacatatatttagtgtaataatagtatatttattacattctttttacatacaaaaagtcagaaagacttaaaagcttctacaaaaagaaatacctgttatatcagctcttaaagaattacatatgaaatcctacgcatttattacacacacacaaatatatatatatatatatacttaaacagaaatatgaattgttattatatttataattagtatttatattaatagaacaatttatagtttatactatggaataaatttttaaatataaatttattatttatattgatatactcatttatagtttttactaagatataagtttataaatataaatttgcacctcttgtgattttgaactggttttttaataaataaaaaataaataaaaagattataaatataaattattattacattaacataataatttacatttattaatttaatactaaatatatatagtaaatgtatcattaaatgaatgtagtaaacatattattaattttcagaaaagttttaatactttttcaccctagaaatatacaaattttttttaattgatataatttttttttgtttatgattcttgtattaatatttaaaccttccgttggagattaacgggtaaaaaatacaaggtttaaacattatataagtaaagttttcttacaacgacaaaacaaaactaattaatatatttacagctaatgatgtttgtttaaaaagtgctaattatatttttttgttctagtcaatgttgtatagttacccaacatataatcagtgacggactttttagttgtggggaaatattcattatatatatatatatatatatgaatcggtgctgcatataatacaatatatacaattttacactgaaaactgtatattattaaaatttatcaggaattatgcttaaatatcttattgtatctatcttattaaagaaatctaattatatctataaaataaaggtttatttcgatcgttttgatatattgtaaatattattttttttgtttgtttttctcgtataaactttaatacatctatatatgtggcttttatatatagggaaaggagaccttgtgacttgctccaaggagcagaactcagaggcattttacgctgctcttggaggattaggtcaatttggggtgataacaagagcaagaatacctctaggacctgcacctactagggcaagtattagtttcccctttcatatagatttcgtaagggtgaaaataaaaataatattttataggactaaaattaaactaatttcatataaacctaaattaaaactcactcaaattatagatgtattaaaatcatatttaatctatatatatgccatttaattttaattgaaacatacatattatatatagatcattttttcctgtaaacttagtcttagacactatacaacttcaatactattaaaattgtaccaaaattaactatcttaaaactaaaaatgagaataagtcgggtaattgacataagtctatgagctcacttgtttaaagcttggtctcatctatctaataaaaaaagttaaacttaaactttttaaaaagtctatttatttatataatttagacttggacttgtgaaaaaacttattaaactgtatagaccggtctaattattcatttaaatatagtaaaacattaaaatatattatacttttattttaatatcttaatatgttaatatatttttatcataaataaaatgaatatttgaaataaatagatctttaaatatgtaataagctaaactatatcatatcttaatttttataacatgccatacctatatatttatataacgtctaacttgacctaacatattatcacccctacttaaaaattatttatctatttatttttaacaaagtttttttcatgtgggtgtttgcaggtaaaatggctccgcctgctatacaacaacttcactgcattttcaagagaccaagaacatttaatatcgttcagtgaaaggaatgacattgctacagcagattatgtagaaggcatgcttctattgaatcagccgccactggatcttctcttttatccagcttctgatcatcaaagggtaacttccttggtaactcaatatggcattatctacatcttggagcttgccaaatactattacaataactctcaggcacatgtcaatgaggtaacttgaaataaaagttgtttttagcatctagttagaaacttcttttatttttattcttatttttttatggacaacatatataatgaatttagtaaagaaatacagagatattctaattgttatatattcatcatacatcaaagatcaaattaatcctcctgattgaaaagaattttgttttcatgaatccaaaagaaacatgtctcaaactcactcaaattgtatggaacccatatattaattaatttatgtacaattcattgttttttactaaattgattatttttcttgtttcttaaataggaagttgcatatttgctgaaagggttaaactttgtacatacatttgtgttcgaaagagatgtgtcatacgaggagtttgtgaacagagtttatcctttggagcaaatgcttaggtcagaaggactttgggaagttcctcacccttggctgaacctctgggttccaagatctagaatctcagattttgatgaaggtgttttcaaggacattgttcttaagcaaaatattactggcggaagttttctagtctacccaacaaacagaagaaacaagtaaattgattagattatttatttttttgtgagtgtcaaattattatctagatcacccgtctcctttaatttacatatcctttctagtgtttccaatatataaaaaaatgacacctcactaaaaaaaataacaaataagagaatttattgttttttaaccacatttttttattgagagaaaacactccacaagaaaaataataataacaacaaaataatttatgtaatttttaaaagaaaaggtcacttaaatttttgcaactctaaaattagttattgaaaaaaaaaacctcaagtctcacatttactagaggaacctcctaagttttttctaaaatgaatatatttctaaaggatatgagacttaaagttttttcaatattaatttacaacattgtgctctgattcaaagtcaagcaatctcctagaataaaagagattgaaaatagcactaacactattggtggggtttgtggtttgtggtctgtggatttaaatttggcatgtggtatttaacagaacttcaacagaggtataaattataaaagatttttttttctgagaaaaagaaataaatggaggtatgttattaaaagagggagtatgaataacaactgtcctaataatactccattgggcctgacagtaggagttgggccataacaattagggacaaaaaataattttggttactaaatttagtcaataattccttttcttagtcacattagatgtttctgttccaatttatttgcttatgtaaatgacttaatttatacatatgtgaggattaaattgaatcaacattatgcttcacaggtgggatgataggatgacaccaattacacctgacgaagatgttttctacgttgtagattttttgcgtgttgctaaaacgtttgatgtggtggacaaactacaggttcaaaacaaacagatactgcggttttgtaatgatgctggtattaagatcacagagtatcttatcgggaacaaaactcatcaacaatgggtggaacactttggcccaaaatggaaactttttgcagatagaaaaactgaatttgatcccaaaaaaatattgtcacctggacatgggattttccagtaaataatgtgctaggtttcagtgaaatctctcattttggaaattcatgaaataaaaatgaaattctgtaccagaaaaaaaaaaaaaaacttgttgtgtaattctgtgccaaacatacattgaattggattgaagttattatgcaattttgtacgaaaaaaaacttatgtatttgattattttatgtttttttattaatgttgaatgttcaaatattctcatgactcacgaacaacggcagatctagaagaaaaaaatggtcgtaagatgtgttgatggtatttaaatgaatgcatgtctacttcaaaatttatttgatagactcatttcgtaaaaaaaaaaaatagaaataacctatttaacaatacttgtttggaaaataaatttaaaaataagaaatttggtcgtttttttatatagaaaatagcattgtttttatgatattttaatgcaattcacgattttatgttgttgggtttttaaataaataaaagttacataaaactttagttttaaattttctttgggactgtgaatggagttaaactctaaaaaagatctataattccaaagtcaggttaccatcaaatattgacatatagcaaaaaaaaaaactactcccttgggaaaattatataaaatattaccttgtcaagagacttgcatttatacaaatgatttatttagcaaaattgttgcatcatgatcaaataggacaaacgttgctaaatcaatgtcactaggcattggcacccttacaagttacaagatacctttaagaaatcgaaaactatttttttcaaaccctttgttttgtgaattaactctttatgagctattttatccctctcaatcggaatataaagagatttttccttacatgacactagtggtctgatcctaagtttgagcttgctcgatgataagcaatgattttaagttttgggtgagaatatataaaaacattggttggagcgttttttgtttttatttttaaagaaaataaaaaataagaatgaaaatatatttatttaaaatttagaaaatattttttctgaatatatttttgaaatagaccaaaaactgaaaataataaatcaacattttcagtcttgtttgaaaaggtgaaaacagcgtggtaccttagagtgctttcttcttaatacattttttttaatcttaaaaatttgaaaatgaaaataaaaaataaacgctcaaatcaagctccacctaaatttttctctattgcaaatgttgaaaaaaatggaaaagcaaaagatctcaaagtaaaataaatatattgtcttttgttacattttgtttcaatgattgtggggaataattgaggtaggataagtggtaggaaaaaatatcaagcaacggataatggtaattgttttatataaaggtttaaatatatttttagtcttttaatttaaaattattattattttttagtccttaaaaacaaatatgcaaattttagtaatctaaaattttaaaatctagttttagtcttgttttgttaactctataacagaggttgtctgtgtggaaaatgatgtgcaattttgtggcgatttctttagtgtgaaaattttgttttaaatttaaatcaaacaaaatgtctcgcaaggcaacaataacgttgttgctgctaacaatcttcgtgtggcaaaatcaacagtggagaaaacgactatcaacaatgttagagaagagttgacgaaggaaaatggggaaaataggacaaacccgaacaaaaaaaccacccttgacttg

SEQ ID NO: 148 - DNA, 5748 bp, Artificial Sequence
  Synthetic polynucleotide
ataaatggtagaaatctgtgggttcaaatgttcaattgctggggatcttcgtgatcatgatgattcatacacaatctctagaaacacgtacgcaaatattaattaatcaatttcctttttatagtctcctcacaattcacatgaaacttcatactctattatccgattccatttccatcgtatctttgaatttgacatttgtttgcccaacatgtaattaactttcccttctcatcttaaagatgtaacatgatatatattataacttgtaattaacccaatatttttaactctctatttttacactcatctgacatgtatttttatttttcatttttttttcttatcacatcacctcttacgtgtacaatttttctctttttcttatttctgtcttccataatagtaattaatattcatcggtccgatatgtatacagcccaaaaaagtgtgtaaaatcatttttgtatttctaaccctctctttctcatgcaagctagcttcttctttctatttatagcccttctcccttcacccaccaacacaccacaactccaaactttttcctcttgttctcttcttcttcaacacaactagtcataatccagctcatctctctctccctctctctttgttctctctttctctttctccaaaatggctctaaactacccttttttaacctacttcatactactgctagtaaccataacccgtttgatattcactgtgggaaaaactgagcaatggaaagctccgattctaccagagcttgacattgataacatatcccacaaactccatgatggcttcaagggactatggccatttaacgcatgaattcccattagctgtgtttcgtccatcttctatagatgacatagtcaccttgataaaatcttcgtacaatagctttgccccttttgacatagctgcgaggggccaaggccactccactcatggacaagccatggctcgtgatgggattgtggtggacatggccagcctaagaaaacaaagaaatggggttgcgattagtgtctctaaggaccctttgatgggtcactatgctgatgttggaggggaacaactctggattgatgtgctacatgccacacttgaatatggacttgcaccagtttcttggactgattatttgtacttgaccgtgggagggacactttctaatgctggaatcagtggccagagcttccgttatggacctcaaatcagcaacgttcatgaaatggatgtcatcactggtatggagttagttgttttttttaatcaataaatgttaatattattagcttgttagttttttttgaaaaaattgaattaactttcgtttcctcttttctttctttttttaaccacacaattaatctaataactactggtattaagttagtttattttccatttttcatatataagttaggatttctaattaaaattgacatttcgtaccaccactacaaaaaaataatgtatcagtggcacaaaaaaatatattggcatcacttgtttttttagtcattaatattttgtagcatcacaaaaaatatggtgacaagttttctaaaaattacaaattaactgattcgtcagtgatgttaatgattttttagtgcgtcttggcaactaatgttttcatcttatataaaattagaaacaatagcggcaacagcacctgacattgtgtttgtgttttgcgtgtttctatcgcctaatttttgttgagaacgtgttcgtgaaacttggaaaaagagaaaattgaaattttcttgagatatctaccacttaagaaaaacaaatggctgtttccgttttgtctcttatgacatgacatggtacgtcatagatgaagttctgctaaatatatttgatatgatttcttgaacacgttttatatattcccacttcccagttagtgtggttgttgaatctaattaaaacaggaatagtctttgtctacaatatgggtgagcgatgcaaactttccaagggtttagaagttagaactatataggtccacggtcataattttatattcttgattaactttatgttggttaagtcgttcatatttggtcaattcattcatatgagaaaatactgaaatacaaacatggaaaaatgttaattactcttataattggcgcatgcatgcatctaaattatatgattttaataaatagtttttgtcatctacttgatttcaggaaaaggagagttcgtaacatgctcttcacagaagaacttggagttattccacgcggttcttggaggcttgggacaatttggagttatagcaagggcgagaattgctcttgagccagcacccaaaagggtacgtttatagagaattgactagaattttgtcttgtagcttttcctccaccaattcatatagtgacacctaatcgaattgtcatttttttttacggtgaattgtcattttgtaaatctaccaagtggtagttggcacccatatatgtatgaactatagtaccatacatttcattttatgttggtgtgttagtcatccatgatgaacacatacacaaatgaaaataggacgagttatacgtacgtaagggtttgaatcactgaatgtggatttttgaagttgaaagcatattaatcttggtttgaaaaagaaaaaaaaaatcggaagtccctcttgaagttatcatgactcttatattaagccaatagaattagaaaaactataattatgaatgatcatgttaattctttcagtgacttaaaatcttatctacaaaaagtacccttttgaaaaagaccttcacttaagtccatgcatacagtactaatcttacatacttgagagttgagacttgaagcatgaggagatttgaagtctggagaaacaagccaccacatattaattactaccgtattcttatctttatttatccttccaattttgatgggactggttgcacatacattcatacatactaacatacataaatacgtctctctctcatgtatttcattttattatattctatttcgttagtaagtttactagtataagacattattaatggtgaatttttgttggcatgcaggttaagtgggtcagactactttatagtgacttttctgcttttaccaaagaccaggaacgattaatctcaatcaatggaaggaaacaaaagaacgcattggattttctggaagggatgctgctaatgaaccaaggccccataaataattggagatcctctttcttccctctatctgaccatcccagaatagcttctttaataactgaacatagcatcctctactgtcttgaagtggctaaatattatgacgaacaaaccgagttaaatgtggacaaggtaacctcgtctagtcatatctattatatatagttagatcttgtcacatttctttgtttaaaaaataaaataaaaggcacaatcccaaaaagtcaaaagcaaatgcctagatattgtgtgttttcttggatattaattattacaccttaataacccataataatttttttatttttctttgtctctgtaggaaattgaagttttgctccaaggactagcctatatccctggatttaattatgagaaaaatgtctcgtacgttgagttcttgaatagggtccgaagtggagagttgaaacttcagtcacaaggactgtgggaagttcctcacccgtggcttaatttgtttataccaaaatctcaaatcttggattttaattcaggagtattcaaagatatagttcttaaaagaaacatctcctctggaccagtcttggtttatcccatgaatagaaacaagtaagccttgaatgcatgaatcacaatctagtgtcattataattcaggagtgtgtgatgcaatcttttaattttctgaccattcaactcaatatcaattttatttcttttttcaattaaaatgcaaaagagaataataattaataatatgaaatttaattccaggtgggacgataggatgtcagcatctataccagacgaggatgttttctacacagttgggtttttgcactcaagtgggtttgatacttggaaggcatatgatgctcaaaacagagaaattttggagttctgtagagatgctggcatcatggtcaagcaatatcttcccaaccacagcacacaagaagattggacaaaccattttggtgctaaatggatgaaattcttagaaagaaaacatcagtttgatccaagaatgattctatcacctgggcaaaaaatcttccacaaaaaattacagccagtgttttaaatattttccctaataaaaaaagtaaaaatgttttgtggtgggactacctcaattagatggctagctagggacaggtgtacatacagtgtgaccaagaccaagatggcttttgtatgctaaagtttgcattgctagctagagaaattaataaggtggggcattaaaggctgcatgagtacttttggcacctattatgctacatattaccttagatacgttaggttgacaaagtcgtactggtaggtacaagaagcacagttgtctctcacactgtctgtcacccaacttgctatatagtgtgtggagaaattcggatcatattgaagatgctgtgagttatagtcctccaatattaaatgtttaacgattctgtctttctcttatataattttgttttgcattatattactttcgcactggtgcaaacatatatatcaatgattataattaatttatacaatgacgagtataattgtacccaagttgcatgccataatatttgtcaaaaacaaaaagttgtatgccataatcaatccaggttgctagataataagatagatatgaatatgataacataaaatgctattaaagcaacaaataaacaataacacatagtccttatagggttcataattgatcgatgaacctagctagacgttgattttaggttaatttccagcgaggataaaatttattatataaagaaataactaaccaacacaaaataataaaaaattaaaaaaaaacgaagaaacttattttagagatataatttgttttagtatttgattgtaatttgagagattagctaggctctcaccaagtgagatctagagtatattcttaagaaaatatttataataaagaacccttaaacattttgcaaaacaaagggtggaattaatattaacaacaataattataatatcttgaaaattttatgaaaataatatatatatatatatatatatagagagagagagagagagagagagaaaattctcacaaacaatttttatctgttatttcaaattggtgtatgactccttagtccttagttcatttgtttgcacccagtcctgtcttaggtagttgattttatagttaggtaaattaatttctcgcactcttcgcttgattgtcatttatgggttgaactgttgaagtgattttatattttttaataaatttcacctgcaaaaaaactcaccattagcatacgccccccccccccccccccccccctctcccaaaaaaaaaaaaaaaacgaaagaagattaattagaaagaataaggtcgtgaaatgatgttacaaataaggcatatcagaatcagacgcaagggaagaataaaaacgttacaacaattcgcgcacaatgcaccccaaaaaaaaaatgacaggcacacataccttaaggaagaagaatcaacgctttca

SEQ ID NO: 149 - DNA, 3646 bp, Artificial Sequence
  Synthetic polynucleotide
cttctcatccaatctaatagcaggatacgcgatgtttacattccgacaatagtggactcagtaccaacaccataaaaaaaaataaacaactagttatgtgtccataggggcaaaagaaaaagaaatacgcactactgtggaaagaagaaaaaaagcaataaggacttatttctatatccggaaaaagcatatatccttaaattggttaatgaacaaaaacttgaaacatgtctttccttcatgtttttgttgtaacttataacataacatgtaattgtttgtggttaccactgtttggaaaaagttgaagatttgtgagatctctcattgatgttacttttcctcttcaacttggcttctgtgtcactgtacatgtgatgcctttggcgtctctcttccttccaagtaagcagtccacatacgcattctcctcgtatcgtatgtcataagtcatgactgatcaacaatgctacgttgaccaagccaccacccacaaactcctttaaattctggcccaaacccttaagttcctgcattctccaatccatcactttctccttttcctcgtgttcacaaaatcacgctgcttaattattccttcaactaccatcatatcataccttctcaacagaaaaataaaaataaaaatgagatacatccttggagaacacaacattctgttcctcaaaagcttcgccttcacgatattattccttagttgcatagccattcggcttaacttgtgtctttccagcatcccttcttcactgaaatggcatttaaaatttgatcaagttagcctaagccatgcagcaagggactttggcaacaggtaccaatataatccaatggcagtgctgcaaccagaatcagtttctgatattgtagccaccataaggcatatctggctgatgggtcctggctcccacctcaccattgcagcgaggggccacggccactcgctgcagggtcaggctcaagcccatggaggacttgtgatcaacatggaatcactcaaggtcccagaaatgcaggtatatcgctaaatattaattgttaatcgttaattttttgttagctaggcaatcaaatccacaatcttttcctctcttccttcttcttatacaaccaaactaaccttataactccaatgcagatacatgttgatgagggaaacaagtctcctccatacgtggatgtctcaggtggcgagttgtggataaacatattgcatgagactctaagatacggcttggcgccaagatcgtggacagactacctgcatctcacagttggtggcactctctccaacgctggtgtcagtggtcagacatttaggcatggtccccagataagtaatgtacagcagctcgagattgttacaggtttgtgaaaaagagaatgaataataattgtttgtcttttctgaataataattcatttgatactggctgcatataagttttctaataaataatttttttcccctactttgatgagtaaaacatggtcaatgaatggatgcaggaacaggggaggtgttgaactgttccgcggagaataatggggatctctttcatggtgttctagggggcttggccaatttggcattataacccgggcaagaattgtcctagaaccagcacctaccatggtaatgcatcactcatcagtgactataccaaaacaagcttctttttttttggttttaatgtgtgctttgggtcatgactgaaaattttctatttattggaacaggtaaaatggattagagtgctgtactcagatttcacagcattcacaagagaccaagagaggttaatatctgcagaaaagacttttgactacattgaaggatttgtgataataaacagaactggtcttctaaataactggcgattatccttcaacccacgagacccggtccaagctagtcatttcaagtcggatggaagaactctcttctgccttgaaatggccaaatacttaaacgtggaagaaatcgatgcagcaaatcaggtgaggccagcaacactcaatctaatagatttttttgaaaataaagggataattaactccaaggttttaaaatatgagaccgtgggttgcaacatcaaagttttctaactctttgcgacccgaattgagactatgtcgatagcatttgtctatgatttgcccgtgatatcaacaaacacgaccaaaccacatgcgactgcgacctatatttaaaaccttgattaactcattagtgataatctttctttaggaaagaaaataaaagaggctaaatcaaccgtatctcacttttgtgtgtgcaggaagttgaggaacatttgtcccgtttaagctacatcccatcaactcttttttcaacagaagtcacatttgtagatttcttagacagggtgcacatatccgaggtcaagttgcgttcaaaaggcttgtgggatgttccacatccatggctcaatcttctaatacccaaaagccaaatactcaactttgcacaagtcgtcttcgggaacatcctatcagaaactagcaacggccccgtccttatctacccagtaaacaaatcaaagtaatgaatggttcagaaaaaaacatactattaactctagaaacaaatattttagccgtcaatattttttaattgacatgttttgttttgtttgcaggtgggacaacagaacttctgttgtgattccagaggaagatattttctacttagtggcatttcttacatctgcagttccatcttcaaatggaactgatggcctagaacacatactaagtcagaacaaaagaatattagaattctgtgaaagagcacaacttggagtgaagcagtatttgccccactacaacacacagcaagaatggagggcccattttggtcctcaatgggagacttttctgctgagaaagtccgtttatgatccattagcaatactcgcccctggccaacgtatatttcaaaaagcaataaccttctcatgaccacatttttattattaattattaaaaatctgaaaaaaaaaaagagaagaaaagtccttcatggcatgtgccaaaatgaaaaaaaaatgttatatgatccagacaggttttgacattgaccatacagaatgcaattgcaaaggaagaaggttcattgatagtagagaaaaagagggagaaaaagagattacaaaatgatgactggtgagatttgtatgccttgcaggttaatgaggaaagttgtcagtgtatgtaggtatgtaccattactgatggaaaaattgccttacgtgctgagtgtagcaccaaggcagcagggtccggctgagattagatcaacaaaacacattaatcattgtagggtttccaaagaacttataaatattatcagcgctagagccaatgtatagtactatcaattttgtaaacactcccttatttgttctctgtctcacatgtatccaaattcattaagattataattaaatacagatatttatgcatccaccacaaaaagatatcaatacgttcgcaacaaatacagataagatgatatataatgctgagtaacaaatactactattctagaaaattgcggaaaatgatataaaaatgggtatgcctaccctgaaggatgatgaat

SEQ ID NO: 150 - DNA, 3651 bp, Artificial Sequence
  Synthetic polynucleotide
cttctcatccaatctaatagcaggatacgcgatgtttacattccgacaatagtggactcagtaccaacaccataaaaaaaaataaacaactagttatgtgtccataggggcaaaagaaaaagaaatacgcactactgtggaaagaagaaaaaaagcaataaggacttatttctatatccggaaaaagcatatatccttaaattggttaatgaacaaaaacttgaaacatgtctttccttcatgtttttgttgtaacttataacataacatgtaattgtttgtggttaccactgtttggaaaaagttgaagatttgtgagatctctcattgatgttacttttcctcttcaacttggcttctgtgtcactgtacatgtgatgcctttggcgtctctcttccttccaagtaagcagtccacatacgcattctcctcgtatcgtatgtcataagtcatgactgatcaacaatgctacgttgaccaagccaccacccacaaactcctttaaattctggcccaaacccttaagttcctgcattctccaatccatcactttctccttttcctcgtgttcacaaaatcacgctgcttaattattccttcaactaccatcatatcataccttctcaacagaaaaataaaaataaaaatgagatacatccttggagaacacaacattctgttcctcaaaagcttcgcttattccttagttgcatagccattcggcttaacttgtgtctttccagcatcccttcttcactgaaatcaattccccttgaagggcatttaaaatttgatcaagttagcctaagccatgcagcaagggactttggcaacaggtaccaatataatccaatggcagtgctgcaaccagaatcagtttctgatattgtagccaccataaggcatatctggctgatgggtcctggctcccacctcaccattgcagcgaggggccacggccactcgctgcagggtcaggctcaagcccatggaggacttgtgatcaacatggaatcactcaaggtcccagaaatgcaggtatatcgctaaatattaattgttaatcgttaattttttgttagctaggcaatcaaatccacaatcttttcctctcttccttcttcttatacaaccaaactaaccttataactccaatgcagatacatgttgatgagggaaacaagtctcctccatacgtggatgtctcaggtggcgagttgtggataaacatattgcatgagactctaagatacggcttggcgccaagatcgtggacagactacctgcatctcacagttggtggcactctctccaacgctggtgtcagtggtcagacatttaggcatggtccccagataagtaatgtacagcagctcgagattgttacaggtttgtgaaaaagagaatgaataataattgtttgtcttttctgaataataattcatttgatactggctgcatataagttttctaataaataatttttttcccctactttgatgagtaaaacatggtcaatgaatggatgcaggaacaggggaggtgttgaactgttccgcggagaataatggggatctctttcatggtgttctagggggcttggccaatttggcattataacccgggcaagaattgtcctagaaccagcacctaccatggtaatgcatcactcatcagtgactataccaaaacaagcttctttttttttggttttaatgtgtgctttgggtcatgactgaaaattttctatttattggaacaggtaaaatggattagagtgctgtactcagatttcacagcattcacaagagaccaagagaggttaatatctgcagaaaagacttttgactacattgaaggatttgtgataataaacagaactggtcttctaaataactggcgattatccttcaacccacgagacccggtccaagctagtcatttcaagtcggatggaagaactctcttctgccttgaaatggccaaatacttaaacgtggaagaaatcgatgcagcaaatcaggtgaggccagcaacactcaatctaatagatttttttgaaaataaagggataattaactccaaggttttaaaatatgagaccgtgggttgcaacatcaaagttttctaactctttgcgacccgaattgagactatgtcgatagcatttgtctatgatttgcccgtgatatcaacaaacacgaccaaaccacatgcgactgcgacctatatttaaaaccttgattaactcattagtgataatctttctttaggaaagaaaataaaagaggctaaatcaaccgtatctcacttttgtgtgtgcaggaagttgaggaacatttgtcccgtttaagctacatcccatcaactcttttttcaacagaagtcacatttgtagatttcttagacagggtgcacatatccgaggtcaagttgcgttcaaaaggcttgtgggatgttccacatccatggctcaatcttctaatacccaaaagccaaatactcaactttgcacaagtcgtcttcgggaacatcctatcagaaactagcaacggccccgtccttatctacccagtaaacaaatcaaagtaatgaatggttcagaaaaaaacatactattaactctagaaacaaatattttagccgtcaatattttttaattgacatgttttgttttgtttgcaggtgggacaacagaacttctgttgtgattccagaggaagatattttctacttagtggcatttcttacatctgcagttccatcttcaaatggaactgatggcctagaacacatactaagtcagaacaaaagaatattagaattctgtgaaagagcacaacttggagtgaagcagtatttgccccactacaacacacagcaagaatggagggcccattttggtcctcaatgggagacttttctgctgagaaagtccgtttatgatccattagcaatactcgcccctggccaacgtatatttcaaaaagcaataaccttctcatgaccacatttttattattaattattaaaaatctgaaaaaaaaaaagagaagaaaagtccttcatggcatgtgccaaaatgaaaaaaaaatgttatatgatccagacaggttttgacattgaccatacagaatgcaattgcaaaggaagaaggttcattgatagtagagaaaaagagggagaaaaagagattacaaaatgatgactggtgagatttgtatgccttgcaggttaatgaggaaagttgtcagtgtatgtaggtatgtaccattactgatggaaaaattgccttacgtgctgagtgtagcaccaaggcagcagggtccggctgagattagatcaacaaaacacattaatcattgtagggtttccaaagaacttataaatattatcagcgctagagccaatgtatagtactatcaattttgtaaacactcccttatttgttctctgtctcacatgtatccaaattcattaagattataattaaatacagatatttatgcatccaccacaaaaagatatcaatacgttcgcaacaaatacagataagatgatatataatgctgagtaacaaatactactattctagaaaattgcggaaaatgatataaaaatgggtatgcctaccctgaaggatgatgaat

SEQ ID NO: 151 - DNA, 5762 bp, Artificial Sequence
  Synthetic polynucleotide
ataaatggtagaaatctgtgggttcaaatgttcaattgctggggatcttcgtgatcatgatgattcatacacaatctctagaaacacgtacgcaaatattaattaatcaatttcctttttatagtctcctcacaattcacatgaaacttcatactctattatccgattccatttccatcgtatctttgaatttgacatttgtttgcccaacatgtaattaactttcccttctcatcttaaagatgtaacatgatatatattataacttgtaattaacccaatatttttaactctctatttttacactcatctgacatgtatttttatttttcatttttttttcttatcacatcacctcttacgtgtacaatttttctctttttcttatttctgtcttccataatagtaattaatattcatcggtccgatatgtatacagcccaaaaaagtgtgtaaaatcatttttgtatttctaaccctctctttctcatgcaagctagcttcttctttctatttatagcccttctcccttcacccaccaacacaccacaactccaaactttttcctcttgttctcttcttcttcaacacaactagtcataatccagctcatctctctctccctctctctttgttctctctttctctttctccaaaatggctctaaactacccttttttaacctacttcatactactgctagtaaccatattgatattcactgtgggaaaaactgagcaatggaaagctccgattctaccagagcttgacattgataacatatcccacaaactccatgatgaccctgaaaccattcaaatggcttcaagggactatggccatttaacgcatgaattcccattagctgtgtttcgtccatcttctatagatgacatagtcaccttgataaaatcttcgtacaatagctttgccccttttgacatagctgcgaggggccaaggccactccactcatggacaagccatggctcgtgatgggattgtggtggacatggccagcctaagaaaacaaagaaatggggttgcgattagtgtctctaaggaccctttgatgggtcactatgctgatgttggaggggaacaactctggattgatgtgctacatgccacacttgaatatggacttgcaccagtttcttggactgattatttgtacttgaccgtgggagggacactttctaatgctggaatcagtggccagagcttccgttatggacctcaaatcagcaacgttcatgaaatggatgtcatcactggtatggagttagttgttttttttaatcaataaatgttaatattattagcttgttagttttttttgaaaaaattgaattaactttcgtttcctcttttctttctttttttaaccacacaattaatctaataactactggtattaagttagtttattttccatttttcatatataagttaggatttctaattaaaattgacatttcgtaccaccactacaaaaaaataatgtatcagtggcacaaaaaaatatattggcatcacttgtttttttagtcattaatattttgtagcatcacaaaaaatatggtgacaagttttctaaaaattacaaattaactgattcgtcagtgatgttaatgattttttagtgcgtcttggcaactaatgttttcatcttatataaaattagaaacaatagcggcaacagcacctgacattgtgtttgtgttttgcgtgtttctatcgcctaatttttgttgagaacgtgttcgtgaaacttggaaaaagagaaaattgaaattttcttgagatatctaccacttaagaaaaacaaatggctgtttccgttttgtctcttatgacatgacatggtacgtcatagatgaagttctgctaaatatatttgatatgatttcttgaacacgttttatatattcccacttcccagttagtgtggttgttgaatctaattaaaacaggaatagtctttgtctacaatatgggtgagcgatgcaaactttccaagggtttagaagttagaactatataggtccacggtcataattttatattcttgattaactttatgttggttaagtcgttcatatttggtcaattcattcatatgagaaaatactgaaatacaaacatggaaaaatgttaattactcttataattggcgcatgcatgcatctaaattatatgattttaataaatagtttttgtcatctacttgatttcaggaaaaggagagttcgtaacatgctcttcacagaagaacttggagttattccacgcggttcttggaggcttgggacaatttggagttatagcaagggcgagaattgctcttgagccagcacccaaaagggtacgtttatagagaattgactagaattttgtcttgtagcttttcctccaccaattcatatagtgacacctaatcgaattgtcatttttttttacggtgaattgtcattttgtaaatctaccaagtggtagttggcacccatatatgtatgaactatagtaccatacatttcattttatgttggtgtgttagtcatccatgatgaacacatacacaaatgaaaataggacgagttatacgtacgtaagggtttgaatcactgaatgtggatttttgaagttgaaagcatattaatcttggtttgaaaaagaaaaaaaaaatcggaagtccctcttgaagttatcatgactcttatattaagccaatagaattagaaaaactataattatgaatgatcatgttaattctttcagtgacttaaaatcttatctacaaaaagtacccttttgaaaaagaccttcacttaagtccatgcatacagtactaatcttacatacttgagagttgagacttgaagcatgaggagatttgaagtctggagaaacaagccaccacatattaattactaccgtattcttatctttatttatccttccaattttgatgggactggttgcacatacattcatacatactaacatacataaatacgtctctctctcatgtatttcattttattatattctatttcgttagtaagtttactagtataagacattattaatggtgaatttttgttggcatgcaggttaagtgggtcagactactttatagtgacttttctgcttttaccaaagaccaggaacgattaatctcaatcaatggaaggaaacaaaagaacgcattggattttctggaagggatgctgctaatgaaccaaggccccataaataattggagatcctctttcttccctctatctgaccatcccagaatagcttctttaataactgaacatagcatcctctactgtcttgaagtggctaaatattatgacgaacaaaccgagttaaatgtggacaaggtaacctcgtctagtcatatctattatatatagttagatcttgtcacatttctttgtttaaaaaataaaataaaaggcacaatcccaaaaagtcaaaagcaaatgcctagatattgtgtgttttcttggatattaattattacaccttaataacccataataatttttttatttttctttgtctctgtaggaaattgaagttttgctccaaggactagcctatatccctggatttaattatgagaaaaatgtctcgtacgttgagttcttgaatagggtccgaagtggagagttgaaacttcagtcacaaggactgtgggaagttcctcacccgtggcttaatttgtttataccaaaatctcaaatcttggattttaattcaggagtattcaaagatatagttcttaaaagaaacatctcctctggaccagtcttggtttatcccatgaatagaaacaagtaagccttgaatgcatgaatcacaatctagtgtcattataattcaggagtgtgtgatgcaatcttttaattttctgaccattcaactcaatatcaattttatttcttttttcaattaaaatgcaaaagagaataataattaataatatgaaatttaattccaggtgggacgataggatgtcagcatctataccagacgaggatgttttctacacagttgggtttttgcactcaagtgggtttgatacttggaaggcatatgatgctcaaaacagagaaattttggagttctgtagagatgctggcatcatggtcaagcaatatcttcccaaccacagcacacaagaagattggacaaaccattttggtgctaaatggatgaaattcttagaaagaaaacatcagtttgatccaagaatgattctatcacctgggcaaaaaatcttccacaaaaaattacagccagtgttttaaatattttccctaataaaaaaagtaaaaatgttttgtggtgggactacctcaattagatggctagctagggacaggtgtacatacagtgtgaccaagaccaagatggcttttgtatgctaaagtttgcattgctagctagagaaattaataaggtggggcattaaaggctgcatgagtacttttggcacctattatgctacatattaccttagatacgttaggttgacaaagtcgtactggtaggtacaagaagcacagttgtctctcacactgtctgtcacccaacttgctatatagtgtgtggagaaattcggatcatattgaagatgctgtgagttatagtcctccaatattaaatgtttaacgattctgtctttctcttatataattttgttttgcattatattactttcgcactggtgcaaacatatatatcaatgattataattaatttatacaatgacgagtataattgtacccaagttgcatgccataatatttgtcaaaaacaaaaagttgtatgccataatcaatccaggttgctagataataagatagatatgaatatgataacataaaatgctattaaagcaacaaataaacaataacacatagtccttatagggttcataattgatcgatgaacctagctagacgttgattttaggttaatttccagcgaggataaaatttattatataaagaaataactaaccaacacaaaataataaaaaattaaaaaaaaacgaagaaacttattttagagatataatttgttttagtatttgattgtaatttgagagattagctaggctctcaccaagtgagatctagagtatattcttaagaaaatatttataataaagaacccttaaacattttgcaaaacaaagggtggaattaatattaacaacaataattataatatcttgaaaattttatgaaaataatatatatatatatatatatatagagagagagagagagagagagagaaaattctcacaaacaatttttatctgttatttcaaattggtgtatgactccttagtccttagttcatttgtttgcacccagtcctgtcttaggtagttgattttatagttaggtaaattaatttctcgcactcttcgcttgattgtcatttatgggttgaactgttgaagtgattttatattttttaataaatttcacctgcaaaaaaactcaccattagcatacgccccccccccccccccccccccctctcccaaaaaaaaaaaaaaaacgaaagaagattaattagaaagaataaggtcgtgaaatgatgttacaaataaggcatatcagaatcagacgcaagggaagaataaaaacgttacaacaattcgcgcacaatgcaccccaaaaaaaaaatgacaggcacacataccttaaggaagaagaatcaacgctttca

SEQ ID NO: 152 - DNA, 5755 bp, Artificial Sequence
  Synthetic polynucleotide
ataaatggtagaaatctgtgggttcaaatgttcaattgctggggatcttcgtgatcatgatgattcatacacaatctctagaaacacgtacgcaaatattaattaatcaatttcctttttatagtctcctcacaattcacatgaaacttcatactctattatccgattccatttccatcgtatctttgaatttgacatttgtttgcccaacatgtaattaactttcccttctcatcttaaagatgtaacatgatatatattataacttgtaattaacccaatatttttaactctctatttttacactcatctgacatgtatttttatttttcatttttttttcttatcacatcacctcttacgtgtacaatttttctctttttcttatttctgtcttccataatagtaattaatattcatcggtccgatatgtatacagcccaaaaaagtgtgtaaaatcatttttgtatttctaaccctctctttctcatgcaagctagcttcttctttctatttatagcccttctcccttcacccaccaacacaccacaactccaaactttttcctcttgttctcttcttcttcaacacaactagtcataatccagctcatctctctctccctctctctttgttctctctttctctttctccaaaatggctctaaactacccttttttaacctacttcatactactgctagtttgatattcactgtgggaaaaactgagcaatggaaagctccgattctaccagagcttgacattgataacatatcccacaaactccatgatgaccctgaaaccattcaaatggcttcaagggactatggccatttaacgcatgaattcccattagctgtgtttcgtccatcttctatagatgacatagtcaccttgataaaatcttcgtacaatagctttgccccttttgacatagctgcgaggggccaaggccactccactcatggacaagccatggctcgtgatgggattgtggtggacatggccagcctaagaaaacaaagaaatggggttgcgattagtgtctctaaggaccctttgatgggtcactatgctgatgttggaggggaacaactctggattgatgtgctacatgccacacttgaatatggacttgcaccagtttcttggactgattatttgtacttgaccgtgggagggacactttctaatgctggaatcagtggccagagcttccgttatggacctcaaatcagcaacgttcatgaaatggatgtcatcactggtatggagttagttgttttttttaatcaataaatgttaatattattagcttgttagttttttttgaaaaaattgaattaactttcgtttcctcttttctttctttttttaaccacacaattaatctaataactactggtattaagttagtttattttccatttttcatatataagttaggatttctaattaaaattgacatttcgtaccaccactacaaaaaaataatgtatcagtggcacaaaaaaatatattggcatcacttgtttttttagtcattaatattttgtagcatcacaaaaaatatggtgacaagttttctaaaaattacaaattaactgattcgtcagtgatgttaatgattttttagtgcgtcttggcaactaatgttttcatcttatataaaattagaaacaatagcggcaacagcacctgacattgtgtttgtgttttgcgtgtttctatcgcctaatttttgttgagaacgtgttcgtgaaacttggaaaaagagaaaattgaaattttcttgagatatctaccacttaagaaaaacaaatggctgtttccgttttgtctcttatgacatgacatggtacgtcatagatgaagttctgctaaatatatttgatatgatttcttgaacacgttttatatattcccacttcccagttagtgtggttgttgaatctaattaaaacaggaatagtctttgtctacaatatgggtgagcgatgcaaactttccaagggtttagaagttagaactatataggtccacggtcataattttatattcttgattaactttatgttggttaagtcgttcatatttggtcaattcattcatatgagaaaatactgaaatacaaacatggaaaaatgttaattactcttataattggcgcatgcatgcatctaaattatatgattttaataaatagtttttgtcatctacttgatttcaggaaaaggagagttcgtaacatgctcttcacagaagaacttggagttattccacgcggttcttggaggcttgggacaatttggagttatagcaagggcgagaattgctcttgagccagcacccaaaagggtacgtttatagagaattgactagaattttgtcttgtagcttttcctccaccaattcatatagtgacacctaatcgaattgtcatttttttttacggtgaattgtcattttgtaaatctaccaagtggtagttggcacccatatatgtatgaactatagtaccatacatttcattttatgttggtgtgttagtcatccatgatgaacacatacacaaatgaaaataggacgagttatacgtacgtaagggtttgaatcactgaatgtggatttttgaagttgaaagcatattaatcttggtttgaaaaagaaaaaaaaaatcggaagtccctcttgaagttatcatgactcttatattaagccaatagaattagaaaaactataattatgaatgatcatgttaattctttcagtgacttaaaatcttatctacaaaaagtacccttttgaaaaagaccttcacttaagtccatgcatacagtactaatcttacatacttgagagttgagacttgaagcatgaggagatttgaagtctggagaaacaagccaccacatattaattactaccgtattcttatctttatttatccttccaattttgatgggactggttgcacatacattcatacatactaacatacataaatacgtctctctctcatgtatttcattttattatattctatttcgttagtaagtttactagtataagacattattaatggtgaatttttgttggcatgcaggttaagtgggtcagactactttatagtgacttttctgcttttaccaaagaccaggaacgattaatctcaatcaatggaaggaaacaaaagaacgcattggattttctggaagggatgctgctaatgaaccaaggccccataaataattggagatcctctttcttccctctatctgaccatcccagaatagcttctttaataactgaacatagcatcctctactgtcttgaagtggctaaatattatgacgaacaaaccgagttaaatgtggacaaggtaacctcgtctagtcatatctattatatatagttagatcttgtcacatttctttgtttaaaaaataaaataaaaggcacaatcccaaaaagtcaaaagcaaatgcctagatattgtgtgttttcttggatattaattattacaccttaataacccataataatttttttatttttctttgtctctgtaggaaattgaagttttgctccaaggactagcctatatccctggatttaattatgagaaaaatgtctcgtacgttgagttcttgaatagggtccgaagtggagagttgaaacttcagtcacaaggactgtgggaagttcctcacccgtggcttaatttgtttataccaaaatctcaaatcttggattttaattcaggagtattcaaagatatagttcttaaaagaaacatctcctctggaccagtcttggtttatcccatgaatagaaacaagtaagccttgaatgcatgaatcacaatctagtgtcattataattcaggagtgtgtgatgcaatcttttaattttctgaccattcaactcaatatcaattttatttcttttttcaattaaaatgcaaaagagaataataattaataatatgaaatttaattccaggtgggacgataggatgtcagcatctataccagacgaggatgttttctacacagttgggtttttgcactcaagtgggtttgatacttggaaggcatatgatgctcaaaacagagaaattttggagttctgtagagatgctggcatcatggtcaagcaatatcttcccaaccacagcacacaagaagattggacaaaccattttggtgctaaatggatgaaattcttagaaagaaaacatcagtttgatccaagaatgattctatcacctgggcaaaaaatcttccacaaaaaattacagccagtgttttaaatattttccctaataaaaaaagtaaaaatgttttgtggtgggactacctcaattagatggctagctagggacaggtgtacatacagtgtgaccaagaccaagatggcttttgtatgctaaagtttgcattgctagctagagaaattaataaggtggggcattaaaggctgcatgagtacttttggcacctattatgctacatattaccttagatacgttaggttgacaaagtcgtactggtaggtacaagaagcacagttgtctctcacactgtctgtcacccaacttgctatatagtgtgtggagaaattcggatcatattgaagatgctgtgagttatagtcctccaatattaaatgtttaacgattctgtctttctcttatataattttgttttgcattatattactttcgcactggtgcaaacatatatatcaatgattataattaatttatacaatgacgagtataattgtacccaagttgcatgccataatatttgtcaaaaacaaaaagttgtatgccataatcaatccaggttgctagataataagatagatatgaatatgataacataaaatgctattaaagcaacaaataaacaataacacatagtccttatagggttcataattgatcgatgaacctagctagacgttgattttaggttaatttccagcgaggataaaatttattatataaagaaataactaaccaacacaaaataataaaaaattaaaaaaaaacgaagaaacttattttagagatataatttgttttagtatttgattgtaatttgagagattagctaggctctcaccaagtgagatctagagtatattcttaagaaaatatttataataaagaacccttaaacattttgcaaaacaaagggtggaattaatattaacaacaataattataatatcttgaaaattttatgaaaataatatatatatatatatatatatagagagagagagagagagagagagaaaattctcacaaacaatttttatctgttatttcaaattggtgtatgactccttagtccttagttcatttgtttgcacccagtcctgtcttaggtagttgattttatagttaggtaaattaatttctcgcactcttcgcttgattgtcatttatgggttgaactgttgaagtgattttatattttttaataaatttcacctgcaaaaaaactcaccattagcatacgccccccccccccccccccccccctctcccaaaaaaaaaaaaaaaacgaaagaagattaattagaaagaataaggtcgtgaaatgatgttacaaataaggcatatcagaatcagacgcaagggaagaataaaaacgttacaacaattcgcgcacaatgcaccccaaaaaaaaaatgacaggcacacataccttaaggaagaagaatcaacgctttca

SEQ ID NO: 153 - DNA, 7389 bp, Artificial Sequence
  Synthetic polynucleotide
ttaaatcggttcaaaattgttgaatcgatccaaaactagtaaatacagtaggttaattgatttcacttgaaatttaaaaaaaaaaaattaaaatgacgtcattttagtttttttttaaattattataacttatatgacatttttaagtgaagtttactttttattattattaatttatgcatactaggtttctgaaatattatattaaaatattatatatatatatatatatatatatatatatatatatatatatatatatatatatatatatatattattaaaatcaattccacttcgattgagctattaacttttgaaccaatatcttccccagttcaatgaccatccaagtctgaaaacattggttaccatcaacgttacccttccgtgaattggaaaagttaatgcaatataggttgatccaaggataagtcctatggtcccagaaagaaaatcttgagagatccttttgataattacccgagtttttactctctccttttaattcacgaaattggaaacttcaattgctaatataaaaagaattttgttagccaatatcatcagggtattgtcaaagaattacaagaaaaaaaaattataagataacataaaaaaataaaaaacaacataattttatatattttaataaaaaattcttttaatttttttttatcaatattctatagttactggcatttgacatgtaaaaatgtaaacatatgaattgataaaatttgaccaatgtttgaccctgagataggaatccaacggccccagttcaattgcaatcttttatttttactacgtgaaggcccaacaatggagaaccttgtggattttattgctgagaatctgtggttacgatgatgacacaccaacacaatcacagaaagcaagtaccgtttggaaggcctaacacttcattaattgcttcattaaatttattttactttctagctgctcaatttaattgctttacacaaatacttcatgacgtttcagaaggagggccaaatacaatctctacaatggttccatcgtatctttgaatttgacatttagcatccctccctttgcacaatgtacaatttgcattttgaatatttttttctcaccttcatatcgtgggactacttctataaccatcctggtgaaaataaataaagcgagggaattacgtaattaaacatatttaaatttctctctcctctgtttaattaatttatcaaaaacaaatatgtgtgcgagtatttaaaaatgtgtaaagtattattattttttaatttttcttttttccttctcatcaatgataaatatactttttaatataaaaatcaaacaataactataaaaaaaacatcttcacttcaattcaacattaaataaaaaataatccctgctttgttattttttacccaccaattatcatatttgttatttattatttttttatgttcttgctataaaggaaatcactatttgactcacacaaaactataaaggaatcaaataatcaattattatttaaaaactctattaaaataacaattacaacaaaatcccttatttttttcttccttatcattattaaaccttcccattctctctttctatctctacatgtttttctcaaattaaatattttctatatcctcctttatcatgcaaattaaagtcctcttccattctatatatagccgctacctcctccacctcctttccccactacaacacacaaacaccaacaaccaaatcaatccatccaccctagaaacaacaaagcactctctcttctctcattctattatcttctctcatcctcttattctctccaaaccaacaaaaaaaaaatggttgctgagaactacccttctcccacatacttcatcctccataaccataacacgtttgatctccacagtgggcaaaacctcccaatggacgaaggccctgtcgctgcctccggaactcgcctccgtctccctcgacgacaccatcttctgcaagctccgtgacgacccagaggcagggaagggcctccagggactacgggaacctcgtccgcgaggttcccttggcagtcttccacccagcctcagcgagcgacatcgcgaggctgatcaagctgtcgtacaacggctctgtccccttcaagattgcggcgagggggcaagggcactcgacaaggggccaggcgatggcacgtgagggggtggtggtggacatggcggggttcagagagagagggaatggagtggggataagggttgtgagtagtgtggaccctaataataagaatggttactactattatgcggatgttggaggggaacagttgtggatcgatgtgctacacgccacgctcgagcatggacttgcacctatgtcctggactgattacttgtacttgacgctgggagggactctctccaatgctggcatcagtggccagacattccgctatggtcctcaaatcaccactgtccgggaaatggacgtaatcaccggtaagaaaactttccattcaaccagttaacttacatgtttttagttttttagcttccaatatccaatagtttataacttgtaagcttcaattttatgttaatttataagctagttttaccctacttttgaaaattcaaggattttggtactacaataactcccttgtcaaactcgttcaattgttggcttagtatcaagtagactcttggatttttaggtgtactttaacaaccatgttaatttaattgatcagggttttaatattatggaaattggccattggacaacttggaatggaaggaaagcgggagatggaaagggaaaagaaattaattagaataattgttaatattagttgcgtgaaaaaaattaaatttgctgaattaaattatggttcatcacgactctatttgtggcaacaccaacgtgccgttttcagaacttcattgcaacagcggttatagtggcgtttattcaattcatattttaatgcatcagactgtgattgcgattgaaattttatgaaatcttgttttataaacttgttcttttgattaggaaacttgattctattttatatatatttaatgtaacgccgaattaatggttgataaacgagtctttgtctaaaattttggcgaatgttagcaagcgttttccacgtggtcccgtacgtgtttgaaaaattcttaatcatggaatcagttcacacgggcagtcatagactcatagactccaattcttgattaattgttttcttattaatattggtccatggtcttattttggtcaattctttttattaaaaataaacgggctgctgaattttaatttactcaagtgtttgttaatgaatatgtgtgcatgcatgcaattatatatatatatatatattactattatttatttgtgttttaatcaaattttggtttggttcaggaaagggagaatttgtgacttgctctcagcagacgaattcggagttgtttcacgcggttcttggaggcttaggacaatttggaattataacaagggcaagaattgctcttgcgccagctccgaagagggtacgtttaaaatcttcggaattgactaggacttgtcttgttgcttcttcctccaacatctctcatatagtaacgcaaatttctaaatatgttacattattaattcaaccaccaagctttgcggaagcatcaaatgtcgttgtcctgaaagcttcatgtcatcatttttcttggcacccatatacacacacatacgtttcacattgtgtcagtgcatattagtcatccatgaaagacacatgtacaaatgaaaacgagaggagttatattaaaatgtgtgttggaaaaatatatatcatattttcataagtcttaattttgaaattaatatacagtaaccctttgagaccttagcaattaagccaataaaaaggctcgtattaaccccaaccaacaactattagaaaatactaacaagtataggtgtatacataaatgattcatttgaattttagtaccttaattatttaactttatccttctatttgacgggactcgttgcataagccatacatacataatcatgcgttcattattgtttttcattatgagttaatgagttgattgtatgaactaatggtgaatttttgttggcaggttaaatgggtgagacttttgtacaatgacttttctgcttttaccaaagaccaggaacaactaatatctatcactggaaggaaacaaaatgtttcactggattatttggaaggattgctgctaatgcaccaaggacccataaataattggagatcttctttcttccctttagccgaccatgcccgaataatttcgctagtaactaaacacagcgtcctctattgcctagaagttgccaaatattatgatggccaaaatgaaaacaatgtggacaaggtaccatctccattcatgtgcatttgccttgatgatgtttcttctattttttcttttaatgttttgatctcaccttatataataaccctttatcacactcaatcttgttatatttttaagagtttaatgataatattatgattttgttgtgaaaaaagagagtttaattgttattatataatcacaaattatcattaatatgacttttaaaataattaataatataaaaattaataaatttatcgtatttaatgagttataattaaatgatcatataaaattattttatattattaacatatagtttttttttctatttttaatatttgttttactataagttgttatattttcaatcttttttctagtataagttttaataatcaatattgtaagtaatattctcatttttcatgttgtgtaggaactccaagttttactacaaggattgagctatatccctggattttactatgaaaaagatgtctcatattttgagttcttgaatagagtccgaagtggagagttgaagctacagtcacaaggactatgggatgttcctcacccgtggcttaatttgtttataccgaaatctcaaatcatggaatttgactcgggcgtgttcaagaatatcatccttaaacgaaacatcaccacaggacctgtcttggtttaccccatgaatagaaacaagtaattgagcttaactaactaatctcaacttatgttgttatcattaggaaaaatgttaattggtacgaaaactatatataccactattttcatttaaattcatgaaagtgaaatttctctttcctaaaacaaattctttctcttaaaatgaatttttgtttttctcaatctccatcaattacttatttccttttttgaatgtttgaaaagtcattcacaacattttcttcataaaagggttattcgtaccaatttaaatagaattgccgttattatcagatgtacaattcttctcttcactcacttcttttccattaaaattgtaaaaaaaaaataaaaaaatcaggtgggacaataggatgtcagcatcaatacccgatgaggatatcttctacacagttggatttttgcattcaagtgggtttgataattggaaggcctatgatgctcaaaataaagaaattctacaattttgtaacgttgctgggatcaaggttaagcaatatcttccccactatcgcacacaagaagattgggcaaaccattttggccctaaatggaggacttttgtagaaagaaaacaccagtttgatccaagaatgattctatcacctggacaaagaatctttaacaattaaaatagctttaaaaatatatattcccccccccccccccccccccaaaaaaaaaaaaattatataatatggtgggactacccaagttagctagctggctgatcacaagtgtgcacataggacccagaattcagatgatagcctttgtacttgtttttgttaagagggtggggttaaaagctgcatgactttggcatatatgtagatcaggttacacatactttagatacgttaggttgacaaaatcatgtgtgaaataagatgcacacagctagctgtgtacctttctttctctctgtccctcaatttgtctatcactaaaaagatttctatatagtttagaacctagtgaagagaaagaaaaaaccattatattgaggatttaattttatcacgttctaatcctatacattaatattcttaaatgtgcaatgagtgtgctcggtgccttaatgattctttatctttgttaattgttatattgtagggttttgtttttgccttcctaattttgtaacaggggcacccctagcaataattgagatcctaggttaactaaggaacagcattattgtgtctaaattgagattcctagctgtatgccataataataaatcatcgtaggttgctagatagatgtgatagcgccaaatgccttccaatactataatctccattgcaagatccttcgttgtgattgtgtagaaaagattacgctgctttacaagagaatactccaagaaagcaagtgattgctccttaatataaagaatcatgcaataaacaaatggtgtcgtaatccataaagtgtatttaatatttgatgaaagagtagtgtagacatcaaacaaaataaagtttgatgcaattcgaattatagatacttgattaatctctaaattatgttgagacaatcatatttgaatttgataagactattatgaacgataaaaaatattataaataataaaaaaatttcatcaaacatttaatacaattatataccttactcaaatttgaaaacctgtacatataggaaaaaaacctttactaaaagaggttaaactcaccatacggatttttatatgtcgaagggatctttaattgtccatcggaaaacatcctaattcataaaaaaggaaagaaagtttagacatgaataattacggaccaatgaatgcaacctacgtctctcaattttaaggagaatttaggaatattatagtatatcactgaaagtacacacaagtggcaatgatgaatattttaatttaaagttttaattggattcgaaattaatcccttcttttttccagaaaaaataataatcatcgagtaatcaagacaatttcccaagtagacaacaagaatacaaaagagaatacgtgacttcgtttcaccatagaaaagaaggaatgcaataacgatgataataattataaaatgaaattgacaaaatatctaaatgcctgtagatatttctacagcgaatgataagtgtttttccattaaaaataagtttcttttgttaagaatttctaacatttttagttccaaaatataggaatgaagccaataagtaagtaagaatttctaacgtctgaaag

SEQ ID NO: 154 - DNA, 7386 bp, Artificial Sequence
  Synthetic polynucleotide
ttaaatcggttcaaaattgttgaatcgatccaaaactagtaaatacagtaggttaattgatttcacttgaaatttaaaaaaaaaaaattaaaatgacgtcattttagtttttttttaaattattataacttatatgacatttttaagtgaagtttactttttattattattaatttatgcatactaggtttctgaaatattatattaaaatattatatatatatatatatatatatatatatatatatatatatatatatatatatatatatatatattattaaaatcaattccacttcgattgagctattaacttttgaaccaatatcttccccagttcaatgaccatccaagtctgaaaacattggttaccatcaacgttacccttccgtgaattggaaaagttaatgcaatataggttgatccaaggataagtcctatggtcccagaaagaaaatcttgagagatccttttgataattacccgagtttttactctctccttttaattcacgaaattggaaacttcaattgctaatataaaaagaattttgttagccaatatcatcagggtattgtcaaagaattacaagaaaaaaaaattataagataacataaaaaaataaaaaacaacataattttatatattttaataaaaaattcttttaatttttttttatcaatattctatagttactggcatttgacatgtaaaaatgtaaacatatgaattgataaaatttgaccaatgtttgaccctgagataggaatccaacggccccagttcaattgcaatcttttatttttactacgtgaaggcccaacaatggagaaccttgtggattttattgctgagaatctgtggttacgatgatgacacaccaacacaatcacagaaagcaagtaccgtttggaaggcctaacacttcattaattgcttcattaaatttattttactttctagctgctcaatttaattgctttacacaaatacttcatgacgtttcagaaggagggccaaatacaatctctacaatggttccatcgtatctttgaatttgacatttagcatccctccctttgcacaatgtacaatttgcattttgaatatttttttctcaccttcatatcgtgggactacttctataaccatcctggtgaaaataaataaagcgagggaattacgtaattaaacatatttaaatttctctctcctctgtttaattaatttatcaaaaacaaatatgtgtgcgagtatttaaaaatgtgtaaagtattattattttttaatttttcttttttccttctcatcaatgataaatatactttttaatataaaaatcaaacaataactataaaaaaaacatcttcacttcaattcaacattaaataaaaaataatccctgctttgttattttttacccaccaattatcatatttgttatttattatttttttatgttcttgctataaaggaaatcactatttgactcacacaaaactataaaggaatcaaataatcaattattatttaaaaactctattaaaataacaattacaacaaaatcccttatttttttcttccttatcattattaaaccttcccattctctctttctatctctacatgtttttctcaaattaaatattttctatatcctcctttatcatgcaaattaaagtcctcttccattctatatatagccgctacctcctccacctcctttccccactacaacacacaaacaccaacaaccaaatcaatccatccaccctagaaacaacaaagcactctctcttctctcattctattatcttctctcatcctcttattctctccaaaccaacaaaaaaaaaatggttgctgagaactacccttctcccacatacttcatcctcataaccataacacgtttgatctccacagtgggcaaaacctcccaatggacgaaggccctgtcgctgcctccggaactcgcctccgtctccctcgacgacaccatcttctgcaagctccgtgacgacccagagggggaagggcctccagggactacgggaacctcgtccgcgaggttcccttggcagtcttccacccagcctcagcgagcgacatcgcgaggctgatcaagctgtcgtacaacggctctgtccccttcaagattgcggcgagggggcaagggcactcgacaaggggccaggcgatggcacgtgagggggtggtggtggacatggcggggttcagagagagagggaatggagtggggataagggttgtgagtagtgtggaccctaataataagaatggttactactattatgcggatgttggaggggaacagttgtggatcgatgtgctacacgccacgctcgagcatggacttgcacctatgtcctggactgattacttgtacttgacgctgggagggactctctccaatgctggcatcagtggccagacattccgctatggtcctcaaatcaccactgtccgggaaatggacgtaatcaccggtaagaaaactttccattcaaccagttaacttacatgtttttagttttttagcttccaatatccaatagtttataacttgtaagcttcaattttatgttaatttataagctagttttaccctacttttgaaaattcaaggattttggtactacaataactcccttgtcaaactcgttcaattgttggcttagtatcaagtagactcttggatttttaggtgtactttaacaaccatgttaatttaattgatcagggttttaatattatggaaattggccattggacaacttggaatggaaggaaagcgggagatggaaagggaaaagaaattaattagaataattgttaatattagttgcgtgaaaaaaattaaatttgctgaattaaattatggttcatcacgactctatttgtggcaacaccaacgtgccgttttcagaacttcattgcaacagcggttatagtggcgtttattcaattcatattttaatgcatcagactgtgattgcgattgaaattttatgaaatcttgttttataaacttgttcttttgattaggaaacttgattctattttatatatatttaatgtaacgccgaattaatggttgataaacgagtctttgtctaaaattttggcgaatgttagcaagcgttttccacgtggtcccgtacgtgtttgaaaaattcttaatcatggaatcagttcacacgggcagtcatagactcatagactccaattcttgattaattgttttcttattaatattggtccatggtcttattttggtcaattctttttattaaaaataaacgggctgctgaattttaatttactcaagtgtttgttaatgaatatgtgtgcatgcatgcaattatatatatatatatatattactattatttatttgtgttttaatcaaattttggtttggttcaggaaagggagaatttgtgacttgctctcagcagacgaattcggagttgtttcacgcggttcttggaggcttaggacaatttggaattataacaagggcaagaattgctcttgcgccagctccgaagagggtacgtttaaaatcttcggaattgactaggacttgtcttgttgcttcttcctccaacatctctcatatagtaacgcaaatttctaaatatgttacattattaattcaaccaccaagctttgcggaagcatcaaatgtcgttgtcctgaaagcttcatgtcatcatttttcttggcacccatatacacacacatacgtttcacattgtgtcagtgcatattagtcatccatgaaagacacatgtacaaatgaaaacgagaggagttatattaaaatgtgtgttggaaaaatatatatcatattttcataagtcttaattttgaaattaatatacagtaaccctttgagaccttagcaattaagccaataaaaaggctcgtattaaccccaaccaacaactattagaaaatactaacaagtataggtgtatacataaatgattcatttgaattttagtaccttaattatttaactttatccttctatttgacgggactcgttgcataagccatacatacataatcatgcgttcattattgtttttcattatgagttaatgagttgattgtatgaactaatggtgaatttttgttggcaggttaaatgggtgagacttttgtacaatgacttttctgcttttaccaaagaccaggaacaactaatatctatcactggaaggaaacaaaatgtttcactggattatttggaaggattgctgctaatgcaccaaggacccataaataattggagatcttctttcttccctttagccgaccatgcccgaataatttcgctagtaactaaacacagcgtcctctattgcctagaagttgccaaatattatgatggccaaaatgaaaacaatgtggacaaggtaccatctccattcatgtgcatttgccttgatgatgtttcttctattttttcttttaatgttttgatctcaccttatataataaccctttatcacactcaatcttgttatatttttaagagtttaatgataatattatgattttgttgtgaaaaaagagagtttaattgttattatataatcacaaattatcattaatatgacttttaaaataattaataatataaaaattaataaatttatcgtatttaatgagttataattaaatgatcatataaaattattttatattattaacatatagtttttttttctatttttaatatttgttttactataagttgttatattttcaatcttttttctagtataagttttaataatcaatattgtaagtaatattctcatttttcatgttgtgtaggaactccaagttttactacaaggattgagctatatccctggattttactatgaaaaagatgtctcatattttgagttcttgaatagagtccgaagtggagagttgaagctacagtcacaaggactatgggatgttcctcacccgtggcttaatttgtttataccgaaatctcaaatcatggaatttgactcgggcgtgttcaagaatatcatccttaaacgaaacatcaccacaggacctgtcttggtttaccccatgaatagaaacaagtaattgagcttaactaactaatctcaacttatgttgttatcattaggaaaaatgttaattggtacgaaaactatatataccactattttcatttaaattcatgaaagtgaaatttctctttcctaaaacaaattctttctcttaaaatgaatttttgtttttctcaatctccatcaattacttatttccttttttgaatgtttgaaaagtcattcacaacattttcttcataaaagggttattcgtaccaatttaaatagaattgccgttattatcagatgtacaattcttctcttcactcacttcttttccattaaaattgtaaaaaaaaaataaaaaaatcaggtgggacaataggatgtcagcatcaatacccgatgaggatatcttctacacagttggatttttgcattcaagtgggtttgataattggaaggcctatgatgctcaaaataaagaaattctacaattttgtaacgttgctgggatcaaggttaagcaatatcttccccactatcgcacacaagaagattgggcaaaccattttggccctaaatggaggacttttgtagaaagaaaacaccagtttgatccaagaatgattctatcacctggacaaagaatctttaacaattaaaatagctttaaaaatatatattcccccccccccccccccccccaaaaaaaaaaaaattatataatatggtgggactacccaagttagctagctggctgatcacaagtgtgcacataggacccagaattcagatgatagcctttgtacttgtttttgttaagagggtggggttaaaagctgcatgactttggcatatatgtagatcaggttacacatactttagatacgttaggttgacaaaatcatgtgtgaaataagatgcacacagctagctgtgtacctttctttctctctgtccctcaatttgtctatcactaaaaagatttctatatagtttagaacctagtgaagagaaagaaaaaaccattatattgaggatttaattttatcacgttctaatcctatacattaatattcttaaatgtgcaatgagtgtgctcggtgccttaatgattctttatctttgttaattgttatattgtagggttttgtttttgccttcctaattttgtaacaggggcacccctagcaataattgagatcctaggttaactaaggaacagcattattgtgtctaaattgagattcctagctgtatgccataataataaatcatcgtaggttgctagatagatgtgatagcgccaaatgccttccaatactataatctccattgcaagatccttcgttgtgattgtgtagaaaagattacgctgctttacaagagaatactccaagaaagcaagtgattgctccttaatataaagaatcatgcaataaacaaatggtgtcgtaatccataaagtgtatttaatatttgatgaaagagtagtgtagacatcaaacaaaataaagtttgatgcaattcgaattatagatacttgattaatctctaaattatgttgagacaatcatatttgaatttgataagactattatgaacgataaaaaatattataaataataaaaaaatttcatcaaacatttaatacaattatataccttactcaaatttgaaaacctgtacatataggaaaaaaacctttactaaaagaggttaaactcaccatacggatttttatatgtcgaagggatctttaattgtccatcggaaaacatcctaattcataaaaaaggaaagaaagtttagacatgaataattacggaccaatgaatgcaacctacgtctctcaattttaaggagaatttaggaatattatagtatatcactgaaagtacacacaagtggcaatgatgaatattttaatttaaagttttaattggattcgaaattaatcccttcttttttccagaaaaaataataatcatcgagtaatcaagacaatttcccaagtagacaacaagaatacaaaagagaatacgtgacttcgtttcaccatagaaaagaaggaatgcaataacgatgataataattataaaatgaaattgacaaaatatctaaatgcctgtagatatttctacagcgaatgataagtgtttttccattaaaaataagtttcttttgttaagaatttctaacatttttagttccaaaatataggaatgaagccaataagtaagtaagaatttctaacgtctgaaag

SEQ ID NO: 155 - DNA, 3624 bp, Artificial Sequence
  Synthetic polynucleotide
cttctcatccaatctaatagcaggatacgcgatgtttacattccgacaatagtggactcagtaccaacaccataaaaaaaaataaacaactagttatgtgtccataggggcaaaagaaaaagaaatacgcactactgtggaaagaagaaaaaaagcaataaggacttatttctatatccggaaaaagcatatatccttaaattggttaatgaacaaaaacttgaaacatgtctttccttcatgtttttgttgtaacttataacataacatgtaattgtttgtggttaccactgtttggaaaaagttgaagatttgtgagatctctcattgatgttacttttcctcttcaacttggcttctgtgtcactgtacatgtgatgcctttggcgtctctcttccttccaagtaagcagtccacatacgcattctcctcgtatcgtatgtcataagtcatgactgatcaacaatgctacgttgaccaagccaccacccacaaactcctttaaattctggcccaaacccttaagttcctgcattctccaatccatcactttctccttttcctcgtgttcacaaaatcacgctgcttaattattccttcaactaccatcatatcataccttctcaacagaaaaataaaaataaaaatgagatacatccttggagaacacaacattctgttcctcaaaagcttcgcctttccttagttgcatagccattcggcttaacttgtgtctttccagcatcccttcggcatttaaaatttgatcaagttagcctaagccatgcagcaagggactttggcaacaggtaccaatataatccaatggcagtgctgcaaccagaatcagtttctgatattgtagccaccataaggcatatctggctgatgggtcctggctcccacctcaccattgcagcgaggggccacggccactcgctgcagggtcaggctcaagcccatggaggacttgtgatcaacatggaatcactcaaggtcccagaaatgcaggtatatcgctaaatattaattgttaatcgttaattttttgttagctaggcaatcaaatccacaatcttttcctctcttccttcttcttatacaaccaaactaaccttataactccaatgcagatacatgttgatgagggaaacaagtctcctccatacgtggatgtctcaggtggcgagttgtggataaacatattgcatgagactctaagatacggcttggcgccaagatcgtggacagactacctgcatctcacagttggtggcactctctccaacgctggtgtcagtggtcagacatttaggcatggtccccagataagtaatgtacagcagctcgagattgttacaggtttgtgaaaaagagaatgaataataattgtttgtcttttctgaataataattcatttgatactggctgcatataagttttctaataaataatttttttcccctactttgatgagtaaaacatggtcaatgaatggatgcaggaacaggggaggtgttgaactgttccgcggagaataatggggatctctttcatggtgttctagggggcttggccaatttggcattataacccgggcaagaattgtcctagaaccagcacctaccatggtaatgcatcactcatcagtgactataccaaaacaagcttctttttttttggttttaatgtgtgctttgggtcatgactgaaaattttctatttattggaacaggtaaaatggattagagtgctgtactcagatttcacagcattcacaagagaccaagagaggttaatatctgcagaaaagacttttgactacattgaaggatttgtgataataaacagaactggtcttctaaataactggcgattatccttcaacccacgagacccggtccaagctagtcatttcaagtcggatggaagaactctcttctgccttgaaatggccaaatacttaaacgtggaagaaatcgatgcagcaaatcaggtgaggccagcaacactcaatctaatagatttttttgaaaataaagggataattaactccaaggttttaaaatatgagaccgtgggttgcaacatcaaagttttctaactctttgcgacccgaattgagactatgtcgatagcatttgtctatgatttgcccgtgatatcaacaaacacgaccaaaccacatgcgactgcgacctatatttaaaaccttgattaactcattagtgataatctttctttaggaaagaaaataaaagaggctaaatcaaccgtatctcacttttgtgtgtgcaggaagttgaggaacatttgtcccgtttaagctacatcccatcaactcttttttcaacagaagtcacatttgtagatttcttagacagggtgcacatatccgaggtcaagttgcgttcaaaaggcttgtgggatgttccacatccatggctcaatcttctaatacccaaaagccaaatactcaactttgcacaagtcgtcttcgggaacatcctatcagaaactagcaacggccccgtccttatctacccagtaaacaaatcaaagtaatgaatggttcagaaaaaaacatactattaactctagaaacaaatattttagccgtcaatattttttaattgacatgttttgttttgtttgcaggtgggacaacagaacttctgttgtgattccagaggaagatattttctacttagtggcatttcttacatctgcagttccatcttcaaatggaactgatggcctagaacacatactaagtcagaacaaaagaatattagaattctgtgaaagagcacaacttggagtgaagcagtatttgccccactacaacacacagcaagaatggagggcccattttggtcctcaatgggagacttttctgctgagaaagtccgtttatgatccattagcaatactcgcccctggccaacgtatatttcaaaaagcaataaccttctcatgaccacatttttattattaattattaaaaatctgaaaaaaaaaaagagaagaaaagtccttcatggcatgtgccaaaatgaaaaaaaaatgttatatgatccagacaggttttgacattgaccatacagaatgcaattgcaaaggaagaaggttcattgatagtagagaaaaagagggagaaaaagagattacaaaatgatgactggtgagatttgtatgccttgcaggttaatgaggaaagttgtcagtgtatgtaggtatgtaccattactgatggaaaaattgccttacgtgctgagtgtagcaccaaggcagcagggtccggctgagattagatcaacaaaacacattaatcattgtagggtttccaaagaacttataaatattatcagcgctagagccaatgtatagtactatcaattttgtaaacactcccttatttgttctctgtctcacatgtatccaaattcattaagattataattaaatacagatatttatgcatccaccacaaaaagatatcaatacgttcgcaacaaatacagataagatgatatataatgctgagtaacaaatactactattctagaaaattgcggaaaatgatataaaaatgggtatgcctaccctgaaggatgatgaat

SEQ ID NO: 156 - DNA, 3632 bp, Artificial Sequence
  Synthetic polynucleotide
cttctcatccaatctaatagcaggatacgcgatgtttacattccgacaatagtggactcagtaccaacaccataaaaaaaaataaacaactagttatgtgtccataggggcaaaagaaaaagaaatacgcactactgtggaaagaagaaaaaaagcaataaggacttatttctatatccggaaaaagcatatatccttaaattggttaatgaacaaaaacttgaaacatgtctttccttcatgtttttgttgtaacttataacataacatgtaattgtttgtggttaccactgtttggaaaaagttgaagatttgtgagatctctcattgatgttacttttcctcttcaacttggcttctgtgtcactgtacatgtgatgcctttggcgtctctcttccttccaagtaagcagtccacatacgcattctcctcgtatcgtatgtcataagtcatgactgatcaacaatgctacgttgaccaagccaccacccacaaactcctttaaattctggcccaaacccttaagttcctgcattctccaatccatcactttctccttttcctcgtgttcacaaaatcacgctgcttaattattccttcaactaccatcatatcataccttctcaacagaaaaataaaaataaaaatgagatacatccttggagaacacaacattctgttcctcaaaagctttattccttagttgcatagccattcggcttaacttgtgtctttccagcatcccttcttcactgaaagggcatttaaaatttgatcaagttagcctaagccatgcagcaagggactttggcaacaggtaccaatataatccaatggcagtgctgcaaccagaatcagtttctgatattgtagccaccataaggcatatctggctgatgggtcctggctcccacctcaccattgcagcgaggggccacggccactcgctgcagggtcaggctcaagcccatggaggacttgtgatcaacatggaatcactcaaggtcccagaaatgcaggtatatcgctaaatattaattgttaatcgttaattttttgttagctaggcaatcaaatccacaatcttttcctctcttccttcttcttatacaaccaaactaaccttataactccaatgcagatacatgttgatgagggaaacaagtctcctccatacgtggatgtctcaggtggcgagttgtggataaacatattgcatgagactctaagatacggcttggcgccaagatcgtggacagactacctgcatctcacagttggtggcactctctccaacgctggtgtcagtggtcagacatttaggcatggtccccagataagtaatgtacagcagctcgagattgttacaggtttgtgaaaaagagaatgaataataattgtttgtcttttctgaataataattcatttgatactggctgcatataagttttctaataaataatttttttcccctactttgatgagtaaaacatggtcaatgaatggatgcaggaacaggggaggtgttgaactgttccgcggagaataatggggatctctttcatggtgttctagggggcttggccaatttggcattataacccgggcaagaattgtcctagaaccagcacctaccatggtaatgcatcactcatcagtgactataccaaaacaagcttctttttttttggttttaatgtgtgctttgggtcatgactgaaaattttctatttattggaacaggtaaaatggattagagtgctgtactcagatttcacagcattcacaagagaccaagagaggttaatatctgcagaaaagacttttgactacattgaaggatttgtgataataaacagaactggtcttctaaataactggcgattatccttcaacccacgagacccggtccaagctagtcatttcaagtcggatggaagaactctcttctgccttgaaatggccaaatacttaaacgtggaagaaatcgatgcagcaaatcaggtgaggccagcaacactcaatctaatagatttttttgaaaataaagggataattaactccaaggttttaaaatatgagaccgtgggttgcaacatcaaagttttctaactctttgcgacccgaattgagactatgtcgatagcatttgtctatgatttgcccgtgatatcaacaaacacgaccaaaccacatgcgactgcgacctatatttaaaaccttgattaactcattagtgataatctttctttaggaaagaaaataaaagaggctaaatcaaccgtatctcacttttgtgtgtgcaggaagttgaggaacatttgtcccgtttaagctacatcccatcaactcttttttcaacagaagtcacatttgtagatttcttagacagggtgcacatatccgaggtcaagttgcgttcaaaaggcttgtgggatgttccacatccatggctcaatcttctaatacccaaaagccaaatactcaactttgcacaagtcgtcttcgggaacatcctatcagaaactagcaacggccccgtccttatctacccagtaaacaaatcaaagtaatgaatggttcagaaaaaaacatactattaactctagaaacaaatattttagccgtcaatattttttaattgacatgttttgttttgtttgcaggtgggacaacagaacttctgttgtgattccagaggaagatattttctacttagtggcatttcttacatctgcagttccatcttcaaatggaactgatggcctagaacacatactaagtcagaacaaaagaatattagaattctgtgaaagagcacaacttggagtgaagcagtatttgccccactacaacacacagcaagaatggagggcccattttggtcctcaatgggagacttttctgctgagaaagtccgtttatgatccattagcaatactcgcccctggccaacgtatatttcaaaaagcaataaccttctcatgaccacatttttattattaattattaaaaatctgaaaaaaaaaaagagaagaaaagtccttcatggcatgtgccaaaatgaaaaaaaaatgttatatgatccagacaggttttgacattgaccatacagaatgcaattgcaaaggaagaaggttcattgatagtagagaaaaagagggagaaaaagagattacaaaatgatgactggtgagatttgtatgccttgcaggttaatgaggaaagttgtcagtgtatgtaggtatgtaccattactgatggaaaaattgccttacgtgctgagtgtagcaccaaggcagcagggtccggctgagattagatcaacaaaacacattaatcattgtagggtttccaaagaacttataaatattatcagcgctagagccaatgtatagtactatcaattttgtaaacactcccttatttgttctctgtctcacatgtatccaaattcattaagattataattaaatacagatatttatgcatccaccacaaaaagatatcaatacgttcgcaacaaatacagataagatgatatataatgctgagtaacaaatactactattctagaaaattgcggaaaatgatataaaaatgggtatgcctaccctgaaggatgatgaat

SEQ ID NO: 157 - DNA, 8142 bp, Artificial Sequence
  Synthetic polynucleotide
ctacttctagaatgacaactactcctatggcaatatcaattgttagcggtggttcccttaagttcgagactaagggcagtctccaaaaggaagaaaggaaataacaaacttaagcctgaatgttctacgttttatttagtgtctcttgatatttaaaggtctatcaaatatgtataataaccgcacttccactataataaccacactcccactacgataatcgctacaataaccaccacaataactacttctaggatgacaactacctctatataagtttccatgacagaacatcttcttcctaacaccttacctatcacaaatgcttctcctctcggtgtcagagagtactattgattccctaagttctgacggtgtctttttctaaccaaagatccacttttcgaaggtcccgagccaattcgatgagagctcggaggcatagaactcggtttagtcacttatgccatgcttcatttcgtcgcgcgtactttaccaatcaacacacgccatcgagattgatctgcaagtgcagattacgtaagcgagaaaggatttgcaatggaattcacaaatcgcacaatcagagaacaggataagtgtactgctaattatgagcgccagggagtgtagattcatgtcttaggttttaaaattagaacagaataaatatgaaaattgttttttactttctatattttatattttaatttttttttagtttttattattagtaatattgttaattataattaattataaaaattttaacaagtaatttattactaatttatcataagataatttataataaaaaaataattgataatttataattaatttataactaattatttttatattttgtttagtaaagactaaaaggtaattaaaatgtaaattatagagattaaaatatcatttttaaactataagaactaaaaaagaattaaaatacaaactataagacaaaaaagatcacttttaaactataggaactaaaaaaattacttttaaattatatggactaaaaaataccaatcgtaaaattataggaactaaataaataatataaccttaaattttttattttaagatcaattttttaaaaaattaatgttaatcatgatattttatttataaaatatcaaaactcattttgtaaaatggattttcatcaaaataaacgttcactttgctatggtaaatcttgttttgtagtattttggttgttctgacccaaatgacccaaatgcaggctagtggacaatgacattgattgttttgtatatgggttgggtgtcccttgtatcctattgatatattccttttgccttattaagaaaaattgcattagaaactactatatattaaatgctctaacaattaatgattaaattgacaccacatcctgtttgactctccacttttcttttattggtactctctattttagtctgctctttatatacatgttaacttaaagacagcaaatttaccaaagtaacttatcttctctcttgaaagaaaaatgccacagaggaatttagtactattttccacaactatggttgtcatagttcacaaaaccccagtggcaattttcaatccatcttctgttagtgacatcttggccttgatacatttctcaaactctcttcctaacccattccccatagcccctagagggaaagcacactctgttcatggacaagccatgacaaaagatggggtggtgttgaatatgactaacctcaatagcagttttcaaaatgggttaggggttttggtgtctgcttgtgatggaaaaggtccattgatttgttatgctgatgtaggtggtggccaaatgtggatcgatgtcttgcatgcatcccttgaacgtggactcacacctttgtctttgactgattatatgtatgccactgttgggggcacactatctaatgctggcatgggtggcatgtcctttcgatttggacctcagatctctaatgttcttgaattggatgttattacaggtatgactcactcaattttatcaattaattttcttccatactcatctacacgcttgttcgaagtgaaacatttaactgaattttttttatcttggatatcacaattgtgtaatttttcgtctagatttgtgattatgttaattcaatctgtatatcttaataattatattaaagtccctccctccttcaattatctgtcaaatatttaacgaaatatatttatgtgacatttgagaatgttgatgggtttatatgtgttattttagtcgattagattttacgtgtgaagttttagtgtctcccaaattcttattaacattgtgggaaaaaatgagaaaacaatcgcagaactggagtttgattccagattattattattatttagtaattttattattatctatatcataatagtatatttattaactcatttaatatcatatttattacatatatttagtgtaataatagtatatttattacattctttttacatacaaaaagtcagaaagacttaaaagcttctacaaaaagaaatacctgttatatcagctcttaaagaattacatatgaaatcctacgcatttattacacacacacaaatatatatatatatatatacttaaacagaaatatgaattgttattatatttataattagtatttatattaatagaacaatttatagtttatactatggaataaatttttaaatataaatttattatttatattgatatactcatttatagtttttactaagatataagtttataaatataaatttgcacctcttgtgattttgaactggttttttaataaataaaaaataaataaaaagattataaatataaattattattacattaacataataatttacatttattaatttaatactaaatatatatagtaaatgtatcattaaatgaatgtagtaaacatattattaattttcagaaaagttttaatactttttcaccctagaaatatacaaattttttttaattgatataatttttttttgtttatgattcttgtattaatatttaaaccttccgttggagattaacgggtaaaaaatacaaggtttaaacattatataagtaaagttttcttacaacgacaaaacaaaactaattaatatatttacagctaatgatgtttgtttaaaaagtgctaattatatttttttgttctagtcaatgttgtatagttacccaacatataatcagtgacggactttttagttgtggggaaatattcattatatatatatatatatatatgaatcggtgctgcatataatacaatatatacaattttacactgaaaactgtatattattaaaatttatcaggaattatgcttaaatatcttattgtatctatcttattaaagaaatctaattatatctataaaataaaggtttatttcgatcgttttgatatattgtaaatattattttttttgtttgtttttctcgtataaactttaatacatctatatatgtggcttttatatatagggaaaggagaccttgtgacttgctccaaggagcagaactcagaggcattttacgctgctcttggaggattaggtcaatttggggtgataacaagagcaagaatacctctaggacctgcacctactagggcaagtattagtttcccctttcatatagatttcgtaagggtgaaaataaaaataatattttataggactaaaattaaactaatttcatataaacctaaattaaaactcactcaaattatagatgtattaaaatcatatttaatctatatatatgccatttaattttaattgaaacatacatattatatatagatcattttttcctgtaaacttagtcttagacactatacaacttcaatactattaaaattgtaccaaaattaactatcttaaaactaaaaatgagaataagtcgggtaattgacataagtctatgagctcacttgtttaaagcttggtctcatctatctaataaaaaaagttaaacttaaactttttaaaaagtctatttatttatataatttagacttggacttgtgaaaaaacttattaaactgtatagaccggtctaattattcatttaaatatagtaaaacattaaaatatattatacttttattttaatatcttaatatgttaatatatttttatcataaataaaatgaatatttgaaataaatagatctttaaatatgtaataagctaaactatatcatatcttaatttttataacatgccatacctatatatttatataacgtctaacttgacctaacatattatcacccctacttaaaaattatttatctatttatttttaacaaagtttttttcatgtgggtgtttgcaggtaaaatggctccgcctgctatacaacaacttcactgcattttcaagagaccaagaacatttaatatcgttcagtgaaaggaatgacattgctacagcagattatgtagaaggcatgcttctattgaatcagccgccactggatcttctcttttatccagcttctgatcatcaaagggtaacttccttggtaactcaatatggcattatctacatcttggagcttgccaaatactattacaataactctcaggcacatgtcaatgaggtaacttgaaataaaagttgtttttagcatctagttagaaacttcttttatttttattcttatttttttatggacaacatatataatgaatttagtaaagaaatacagagatattctaattgttatatattcatcatacatcaaagatcaaattaatcctcctgattgaaaagaattttgttttcatgaatccaaaagaaacatgtctcaaactcactcaaattgtatggaacccatatattaattaatttatgtacaattcattgttttttactaaattgattatttttcttgtttcttaaataggaagttgcatatttgctgaaagggttaaactttgtacatacatttgtgttcgaaagagatgtgtcatacgaggagtttgtgaacagagtttatcctttggagcaaatgcttaggtcagaaggactttgggaagttcctcacccttggctgaacctctgggttccaagatctagaatctcagattttgatgaaggtgttttcaaggacattgttcttaagcaaaatattactggcggaagttttctagtctacccaacaaacagaagaaacaagtaaattgattagattatttatttttttgtgagtgtcaaattattatctagatcacccgtctcctttaatttacatatcctttctagtgtttccaatatataaaaaaatgacacctcactaaaaaaaataacaaataagagaatttattgttttttaaccacatttttttattgagagaaaacactccacaagaaaaataataataacaacaaaataatttatgtaatttttaaaagaaaaggtcacttaaatttttgcaactctaaaattagttattgaaaaaaaaaacctcaagtctcacatttactagaggaacctcctaagttttttctaaaatgaatatatttctaaaggatatgagacttaaagttttttcaatattaatttacaacattgtgctctgattcaaagtcaagcaatctcctagaataaaagagattgaaaatagcactaacactattggtggggtttgtggtttgtggtctgtggatttaaatttggcatgtggtatttaacagaacttcaacagaggtataaattataaaagatttttttttctgagaaaaagaaataaatggaggtatgttattaaaagagggagtatgaataacaactgtcctaataatactccattgggcctgacagtaggagttgggccataacaattagggacaaaaaataattttggttactaaatttagtcaataattccttttcttagtcacattagatgtttctgttccaatttatttgcttatgtaaatgacttaatttatacatatgtgaggattaaattgaatcaacattatgcttcacaggtgggatgataggatgacaccaattacacctgacgaagatgttttctacgttgtagattttttgcgtgttgctaaaacgtttgatgtggtggacaaactacaggttcaaaacaaacagatactgcggttttgtaatgatgctggtattaagatcacagagtatcttatcgggaacaaaactcatcaacaatgggtggaacactttggcccaaaatggaaactttttgcagatagaaaaactgaatttgatcccaaaaaaatattgtcacctggacatgggattttccagtaaataatgtgctaggtttcagtgaaatctctcattttggaaattcatgaaataaaaatgaaattctgtaccagaaaaaaaaaaaaaaacttgttgtgtaattctgtgccaaacatacattgaattggattgaagttattatgcaattttgtacgaaaaaaaacttatgtatttgattattttatgtttttttattaatgttgaatgttcaaatattctcatgactcacgaacaacggcagatctagaagaaaaaaatggtcgtaagatgtgttgatggtatttaaatgaatgcatgtctacttcaaaatttatttgatagactcatttcgtaaaaaaaaaaaatagaaataacctatttaacaatacttgtttggaaaataaatttaaaaataagaaatttggtcgtttttttatatagaaaatagcattgtttttatgatattttaatgcaattcacgattttatgttgttgggtttttaaataaataaaagttacataaaactttagttttaaattttctttgggactgtgaatggagttaaactctaaaaaagatctataattccaaagtcaggttaccatcaaatattgacatatagcaaaaaaaaaaactactcccttgggaaaattatataaaatattaccttgtcaagagacttgcatttatacaaatgatttatttagcaaaattgttgcatcatgatcaaataggacaaacgttgctaaatcaatgtcactaggcattggcacccttacaagttacaagatacctttaagaaatcgaaaactatttttttcaaaccctttgttttgtgaattaactctttatgagctattttatccctctcaatcggaatataaagagatttttccttacatgacactagtggtctgatcctaagtttgagcttgctcgatgataagcaatgattttaagttttgggtgagaatatataaaaacattggttggagcgttttttgtttttatttttaaagaaaataaaaaataagaatgaaaatatatttatttaaaatttagaaaatattttttctgaatatatttttgaaatagaccaaaaactgaaaataataaatcaacattttcagtcttgtttgaaaaggtgaaaacagcgtggtaccttagagtgctttcttcttaatacattttttttaatcttaaaaatttgaaaatgaaaataaaaaataaacgctcaaatcaagctccacctaaatttttctctattgcaaatgttgaaaaaaatggaaaagcaaaagatctcaaagtaaaataaatatattgtcttttgttacattttgtttcaatgattgtggggaataattgaggtaggataagtggtaggaaaaaatatcaagcaacggataatggtaattgttttatataaaggtttaaatatatttttagtcttttaatttaaaattattattattttttagtccttaaaaacaaatatgcaaattttagtaatctaaaattttaaaatctagttttagtcttgttttgttaactctataacagaggttgtctgtgtggaaaatgatgtgcaattttgtggcgatttctttagtgtgaaaattttgttttaaatttaaatcaaacaaaatgtctcgcaaggcaacaataacgttgttgctgctaacaatcttcgtgtggcaaaatcaacagtggagaaaacgactatcaacaatgttagagaagagttgacgaaggaaaatggggaaaataggacaaacccgaacaaaaaaaccacccttgacttg

SEQ ID NO: 158 - DNA, 8237 bp, Artificial Sequence
  Synthetic polynucleotide
ctacttctagaatgacaactactcctatggcaatatcaattgttagcggtggttcccttaagttcgagactaagggcagtctccaaaaggaagaaaggaaataacaaacttaagcctgaatgttctacgttttatttagtgtctcttgatatttaaaggtctatcaaatatgtataataaccgcacttccactataataaccacactcccactacgataatcgctacaataaccaccacaataactacttctaggatgacaactacctctatataagtttccatgacagaacatcttcttcctaacaccttacctatcacaaatgcttctcctctcggtgtcagagagtactattgattccctaagttctgacggtgtctttttctaaccaaagatccacttttcgaaggtcccgagccaattcgatgagagctcggaggcatagaactcggtttagtcacttatgccatgcttcatttcgtcgcgcgtactttaccaatcaacacacgccatcgagattgatctgcaagtgcagattacgtaagcgagaaaggatttgcaatggaattcacaaatcgcacaatcagagaacaggataagtgtactgctaattatgagcgccagggagtgtagattcatgtcttaggttttaaaattagaacagaataaatatgaaaattgttttttactttctatattttatattttaatttttttttagtttttattattagtaatattgttaattataattaattataaaaattttaacaagtaatttattactaatttatcataagataatttataataaaaaaataattgataatttataattaatttataactaattatttttatattttgtttagtaaagactaaaaggtaattaaaatgtaaattatagagattaaaatatcatttttaaactataagaactaaaaaagaattaaaatacaaactataagacaaaaaagatcacttttaaactataggaactaaaaaaattacttttaaattatatggactaaaaaataccaatcgtaaaattataggaactaaataaataatataaccttaaattttttattttaagatcaattttttaaaaaattaatgttaatcatgatattttatttataaaatatcaaaactcattttgtaaaatggattttcatcaaaataaacgttcactttgctatggtaaatcttgttttgtagtattttggttgttctgacccaaatgacccaaatgcaggctagtggacaatgacattgattgttttgtatatgggttgggtgtcccttgtatcctattgatatattccttttgccttattaagaaaaattgcattagaaactactatatattaaatgctctaacaattaatgattaaattgacaccacatcctgtttgactctccacttttcttttattggtactctctattttagtctgctctttatatacatgttaacttaaagacagcaaatttaccaaagtaacttatcttctctcttgaaagaaaaatgccacagaggaatttagtatgctatctagcatagtgctcacacaagcacaaccacgatcatggtcagcattccaagcatccaaagaactagccacaaagcttagtcgtaaccctcaaacctttccacatgcctcacacatagttcacaaaaccccagtggcaattttcaatccatcttctgttagtgacatcttggccttgatacatttctcaaactctcttcctaacccattccccatagcccctagagggaaagcacactctgttcatggacaagccatgacaaaagatggggtggtgttgaatatgactaacctcaatagcagttttcaaaatgggttaggggttttggtgtctgcttgtgatggaaaaggtccattgatttgttatgctgatgtaggtggtggccaaatgtggatcgatgtcttgcatgcatcccttgaacgtggactcacacctttgtctttgactgattatatgtatgccactgttgggggcacactatctaatgctggcatgggtggcatgtcctttcgatttggacctcagatctctaatgttcttgaattggatgttattacaggtatgactcactcaattttatcaattaattttcttccatactcatctacacgcttgttcgaagtgaaacatttaactgaattttttttatcttggatatcacaattgtgtaatttttcgtctagatttgtgattatgttaattcaatctgtatatcttaataattatattaaagtccctccctccttcaattatctgtcaaatatttaacgaaatatatttatgtgacatttgagaatgttgatgggtttatatgtgttattttagtcgattagattttacgtgtgaagttttagtgtctcccaaattcttattaacattgtgggaaaaaatgagaaaacaatcgcagaactggagtttgattccagattattattattatttagtaattttattattatctatatcataatagtatatttattaactcatttaatatcatatttattacatatatttagtgtaataatagtatatttattacattctttttacatacaaaaagtcagaaagacttaaaagcttctacaaaaagaaatacctgttatatcagctcttaaagaattacatatgaaatcctacgcatttattacacacacacaaatatatatatatatatatacttaaacagaaatatgaattgttattatatttataattagtatttatattaatagaacaatttatagtttatactatggaataaatttttaaatataaatttattatttatattgatatactcatttatagtttttactaagatataagtttataaatataaatttgcacctcttgtgattttgaactggttttttaataaataaaaaataaataaaaagattataaatataaattattattacattaacataataatttacatttattaatttaatactaaatatatatagtaaatgtatcattaaatgaatgtagtaaacatattattaattttcagaaaagttttaatactttttcaccctagaaatatacaaattttttttaattgatataatttttttttgtttatgattcttgtattaatatttaaaccttccgttggagattaacgggtaaaaaatacaaggtttaaacattatataagtaaagttttcttacaacgacaaaacaaaactaattaatatatttacagctaatgatgtttgtttaaaaagtgctaattatatttttttgttctagtcaatgttgtatagttacccaacatataatcagtgacggactttttagttgtggggaaatattcattatatatatatatatatatatgaatcggtgctgcatataatacaatatatacaattttacactgaaaactgtatattattaaaatttatcaggaattatgcttaaatatcttattgtatctatcttattaaagaaatctaattatatctataaaataaaggtttatttcgatcgttttgatatattgtaaatattattttttttgtttgtttttctcgtataaactttaatacatctatatatgtggcttttatatatagggaaaggagaccttgtgacttgctccaaggagcagaactcagaggcattttacgctgctcttggaggattaggtcaatttggggtgataacaagagcaagaatacctctaggacctgcacctactagggcaagtattagtttcccctttcatatagatttcgtaagggtgaaaataaaaataatattttataggactaaaattaaactaatttcatataaacctaaattaaaactcactcaaattatagatgtattaaaatcatatttaatctatatatatgccatttaattttaattgaaacatacatattatatatagatcattttttcctgtaaacttagtcttagacactatacaacttcaatactattaaaattgtaccaaaattaactatcttaaaactaaaaatgagaataagtcgggtaattgacataagtctatgagctcacttgtttaaagcttggtctcatctatctaataaaaaaagttaaacttaaactttttaaaaagtctatttatttatataatttagacttggacttgtgaaaaaacttattaaactgtatagaccggtctaattattcatttaaatatagtaaaacattaaaatatattatacttttattttaatatcttaatatgttaatatatttttatcataaataaaatgaatatttgaaataaatagatctttaaatatgtaataagctaaactatatcatatcttaatttttataacatgccatacctatatatttatataacgtctaacttgacctaacatattatcacccctacttaaaaattatttatctatttatttttaacaaagtttttttcatgtgggtgtttgcaggtaaaatggctccgcctgctatacaacaacttcactgcattttcaagagaccaagaacatttaatatcgttcagtgaaaggaatgacattgctacagcagattatgtagaaggcatgcttctattgaatcagccgccactggatcttctcttttatccagcttctgatcatcaaagggtaacttccttggtaactcaatatggcattatctacatcttggagcttgccaaatactattacaataactctcaggcacatgtcaatgaggtaacttgaaataaaagttgtttttagcatctagttagaaacttcttttatttttattcttatttttttatggacaacatatataatgaatttagtaaagaaatacagagatattctaattgttatatattcatcatacatcaaagatcaaattaatcctcctgattgaaaagaattttgttttcatgaatccaaaagaaacatgtctcaaactcactcaaattgtatggaacccatatattaattaatttatgtacaattcattgttttttactaaattgattatttttcttgtttcttaaataggaagttgcatatttgctgaaagggttaaactttgtacatacatttgtgttcgaaagagatgtgtcatacgaggagtttgtgaacagagtttatcctttggagcaaatgcttaggtcagaaggactttgggaagttcctcacccttggctgaacctctgggttccaagatctagaatctcagattttgatgaaggtgttttcaaggacattgttcttaagcaaaatattactggcggaagttttctagtctacccaacaaacagaagaaacaagtaaattgattagattatttatttttttgtgagtgtcaaattattatctagatcacccgtctcctttaatttacatatcctttctagtgtttccaatatataaaaaaatgacacctcactaaaaaaaataacaaataagagaatttattgttttttaaccacatttttttattgagagaaaacactccacaagaaaaataataataacaacaaaataatttatgtaatttttaaaagaaaaggtcacttaaatttttgcaactctaaaattagttattgaaaaaaaaaacctcaagtctcacatttactagaggaacctcctaagttttttctaaaatgaatatatttctaaaggatatgagacttaaagttttttcaatattaatttacaacattgtgctctgattcaaagtcaagcaatctcctagaataaaagagattgaaaatagcactaacactattggtggggtttgtggtttgtggtctgtggatttaaatttggcatgtggtatttaacagaacttcaacagaggtataaattataaaagatttttttttctgagaaaaagaaataaatggaggtatgttattaaaagagggagtatgaataacaactgtcctaataatactccattgggcctgacagtaggagttgggccataacaattagggacaaaaaataattttggttactaaatttagtcaataattccttttcttagtcacattagatgtttctgttccaatttatttgcttatgtaaatgacttaatttatacatatgtgaggattaaattgaatcaacattatgcttcacaggtgggatgataggatgacaccaattacacctgacgaagatgttttctacgttgtagattttttgcgtgttgctaaaacgtttgatgtggtggacaaactacaggttcaaaacaaacagatactgcggttttgtaatgatgctggtattaagatcacagagtatcttatcgggaacaaaactcatcaacaatgggtggaacactttggcccaaaatggaaactttttgcagatagaaaaactgaatttgatcccaaaaaaatattgtcacctggacatgggattttccagtaaataatgtgctaggtttcagtgaaatctctcattttggaaattcatgaaataaaaatgaaattctgtaccagaaaaaaaaaaaaaaacttgttgtgtaattctgtgccaaacatacattgaattggattgaagttattatgcaattttgtacgaaaaaaaacttatgtatttgattattttatgtttttttattaatgttgaatgttcaaatattctcatgactcacgaacaacggcagatctagaagaaaaaaatggtcgtaagatgtgttgatggtatttaaatgaatgcatgtctacttcaaaatttatttgatagactcatttcgtaaaaaaaaaaaatagaaataacctatttaacaatacttgtttggaaaataaatttaaaaataagaaatttggtcgtttttttatatagaaaatagcattgtttttatgatattttaatgcaattcacgattttatgttgttgggtttttaaataaataaaagttacataaaactttagttttaaattttctttgggactgtgaatggagttaaactctaaaaaagatctataattccaaagtcaggttaccatcaaatattgacatatagcaaaaaaaaaaactactcccttgggaaaattatataaaatattaccttgtcaagagacttgcatttatacaaatgatttatttagcaaaattgttgcatcatgatcaaataggacaaacgttgctaaatcaatgtcactaggcattggcacccttacaagttacaagatacctttaagaaatcgaaaactatttttttcaaaccctttgttttgtgaattaactctttatgagctattttatccctctcaatcggaatataaagagatttttccttacatgacactagtggtctgatcctaagtttgagcttgctcgatgataagcaatgattttaagttttgggtgagaatatataaaaacattggttggagcgttttttgtttttatttttaaagaaaataaaaaataagaatgaaaatatatttatttaaaatttagaaaatattttttctgaatatatttttgaaatagaccaaaaactgaaaataataaatcaacattttcagtcttgtttgaaaaggtgaaaacagcgtggtaccttagagtgctttcttcttaatacattttttttaatcttaaaaatttgaaaatgaaaataaaaaataaacgctcaaatcaagctccacctaaatttttctctattgcaaatgttgaaaaaaatggaaaagcaaaagatctcaaagtaaaataaatatattgtcttttgttacattttgtttcaatgattgtggggaataattgaggtaggataagtggtaggaaaaaatatcaagcaacggataatggtaattgttttatataaaggtttaaatatatttttagtcttttaatttaaaattattattattttttagtccttaaaaacaaatatgcaaattttagtaatctaaaattttaaaatctagttttagtcttgttttgttaactctataacagaggttgtctgtgtggaaaatgatgtgcaattttgtggcgatttctttagtgtgaaaattttgttttaaatttaaatcaaacaaaatgtctcgcaaggcaacaataacgttgttgctgctaacaatcttcgtgtggcaaaatcaacagtggagaaaacgactatcaacaatgttagagaagagttgacgaaggaaaatggggaaaataggacaaacccgaacaaaaaaaccacccttgacttg

SEQ ID NO: 159 - DNA, 5762 bp, Artificial Sequence
  Synthetic polynucleotide
ataaatggtagaaatctgtgggttcaaatgttcaattgctggggatcttcgtgatcatgatgattcatacacaatctctagaaacacgtacgcaaatattaattaatcaatttcctttttatagtctcctcacaattcacatgaaacttcatactctattatccgattccatttccatcgtatctttgaatttgacatttgtttgcccaacatgtaattaactttcccttctcatcttaaagatgtaacatgatatatattataacttgtaattaacccaatatttttaactctctatttttacactcatctgacatgtatttttatttttcatttttttttcttatcacatcacctcttacgtgtacaatttttctctttttcttatttctgtcttccataatagtaattaatattcatcggtccgatatgtatacagcccaaaaaagtgtgtaaaatcatttttgtatttctaaccctctctttctcatgcaagctagcttcttctttctatttatagcccttctcccttcacccaccaacacaccacaactccaaactttttcctcttgttctcttcttcttcaacacaactagtcataatccagctcatctctctctccctctctctttgttctctctttctctttctccaaaatggctctaaactacccttttttaacctacttcatactactgctagtaaccagtttgatattcactgtgggaaaaactgagcaatggaaagctccgattctaccagagcttgacattgataacatatcccacaaactccatgatgaccctgaaaccattcaaatggcttcaagggactatggccatttaacgcatgaattcccattagctgtgtttcgtccatcttctatagatgacatagtcaccttgataaaatcttcgtacaatagctttgccccttttgacatagctgcgaggggccaaggccactccactcatggacaagccatggctcgtgatgggattgtggtggacatggccagcctaagaaaacaaagaaatggggttgcgattagtgtctctaaggaccctttgatgggtcactatgctgatgttggaggggaacaactctggattgatgtgctacatgccacacttgaatatggacttgcaccagtttcttggactgattatttgtacttgaccgtgggagggacactttctaatgctggaatcagtggccagagcttccgttatggacctcaaatcagcaacgttcatgaaatggatgtcatcactggtatggagttagttgttttttttaatcaataaatgttaatattattagcttgttagttttttttgaaaaaattgaattaactttcgtttcctcttttctttctttttttaaccacacaattaatctaataactactggtattaagttagtttattttccatttttcatatataagttaggatttctaattaaaattgacatttcgtaccaccactacaaaaaaataatgtatcagtggcacaaaaaaatatattggcatcacttgtttttttagtcattaatattttgtagcatcacaaaaaatatggtgacaagttttctaaaaattacaaattaactgattcgtcagtgatgttaatgattttttagtgcgtcttggcaactaatgttttcatcttatataaaattagaaacaatagcggcaacagcacctgacattgtgtttgtgttttgcgtgtttctatcgcctaatttttgttgagaacgtgttcgtgaaacttggaaaaagagaaaattgaaattttcttgagatatctaccacttaagaaaaacaaatggctgtttccgttttgtctcttatgacatgacatggtacgtcatagatgaagttctgctaaatatatttgatatgatttcttgaacacgttttatatattcccacttcccagttagtgtggttgttgaatctaattaaaacaggaatagtctttgtctacaatatgggtgagcgatgcaaactttccaagggtttagaagttagaactatataggtccacggtcataattttatattcttgattaactttatgttggttaagtcgttcatatttggtcaattcattcatatgagaaaatactgaaatacaaacatggaaaaatgttaattactcttataattggcgcatgcatgcatctaaattatatgattttaataaatagtttttgtcatctacttgatttcaggaaaaggagagttcgtaacatgctcttcacagaagaacttggagttattccacgcggttcttggaggcttgggacaatttggagttatagcaagggcgagaattgctcttgagccagcacccaaaagggtacgtttatagagaattgactagaattttgtcttgtagcttttcctccaccaattcatatagtgacacctaatcgaattgtcatttttttttacggtgaattgtcattttgtaaatctaccaagtggtagttggcacccatatatgtatgaactatagtaccatacatttcattttatgttggtgtgttagtcatccatgatgaacacatacacaaatgaaaataggacgagttatacgtacgtaagggtttgaatcactgaatgtggatttttgaagttgaaagcatattaatcttggtttgaaaaagaaaaaaaaaatcggaagtccctcttgaagttatcatgactcttatattaagccaatagaattagaaaaactataattatgaatgatcatgttaattctttcagtgacttaaaatcttatctacaaaaagtacccttttgaaaaagaccttcacttaagtccatgcatacagtactaatcttacatacttgagagttgagacttgaagcatgaggagatttgaagtctggagaaacaagccaccacatattaattactaccgtattcttatctttatttatccttccaattttgatgggactggttgcacatacattcatacatactaacatacataaatacgtctctctctcatgtatttcattttattatattctatttcgttagtaagtttactagtataagacattattaatggtgaatttttgttggcatgcaggttaagtgggtcagactactttatagtgacttttctgcttttaccaaagaccaggaacgattaatctcaatcaatggaaggaaacaaaagaacgcattggattttctggaagggatgctgctaatgaaccaaggccccataaataattggagatcctctttcttccctctatctgaccatcccagaatagcttctttaataactgaacatagcatcctctactgtcttgaagtggctaaatattatgacgaacaaaccgagttaaatgtggacaaggtaacctcgtctagtcatatctattatatatagttagatcttgtcacatttctttgtttaaaaaataaaataaaaggcacaatcccaaaaagtcaaaagcaaatgcctagatattgtgtgttttcttggatattaattattacaccttaataacccataataatttttttatttttctttgtctctgtaggaaattgaagttttgctccaaggactagcctatatccctggatttaattatgagaaaaatgtctcgtacgttgagttcttgaatagggtccgaagtggagagttgaaacttcagtcacaaggactgtgggaagttcctcacccgtggcttaatttgtttataccaaaatctcaaatcttggattttaattcaggagtattcaaagatatagttcttaaaagaaacatctcctctggaccagtcttggtttatcccatgaatagaaacaagtaagccttgaatgcatgaatcacaatctagtgtcattataattcaggagtgtgtgatgcaatcttttaattttctgaccattcaactcaatatcaattttatttcttttttcaattaaaatgcaaaagagaataataattaataatatgaaatttaattccaggtgggacgataggatgtcagcatctataccagacgaggatgttttctacacagttgggtttttgcactcaagtgggtttgatacttggaaggcatatgatgctcaaaacagagaaattttggagttctgtagagatgctggcatcatggtcaagcaatatcttcccaaccacagcacacaagaagattggacaaaccattttggtgctaaatggatgaaattcttagaaagaaaacatcagtttgatccaagaatgattctatcacctgggcaaaaaatcttccacaaaaaattacagccagtgttttaaatattttccctaataaaaaaagtaaaaatgttttgtggtgggactacctcaattagatggctagctagggacaggtgtacatacagtgtgaccaagaccaagatggcttttgtatgctaaagtttgcattgctagctagagaaattaataaggtggggcattaaaggctgcatgagtacttttggcacctattatgctacatattaccttagatacgttaggttgacaaagtcgtactggtaggtacaagaagcacagttgtctctcacactgtctgtcacccaacttgctatatagtgtgtggagaaattcggatcatattgaagatgctgtgagttatagtcctccaatattaaatgtttaacgattctgtctttctcttatataattttgttttgcattatattactttcgcactggtgcaaacatatatatcaatgattataattaatttatacaatgacgagtataattgtacccaagttgcatgccataatatttgtcaaaaacaaaaagttgtatgccataatcaatccaggttgctagataataagatagatatgaatatgataacataaaatgctattaaagcaacaaataaacaataacacatagtccttatagggttcataattgatcgatgaacctagctagacgttgattttaggttaatttccagcgaggataaaatttattatataaagaaataactaaccaacacaaaataataaaaaattaaaaaaaaacgaagaaacttattttagagatataatttgttttagtatttgattgtaatttgagagattagctaggctctcaccaagtgagatctagagtatattcttaagaaaatatttataataaagaacccttaaacattttgcaaaacaaagggtggaattaatattaacaacaataattataatatcttgaaaattttatgaaaataatatatatatatatatatatatagagagagagagagagagagagagaaaattctcacaaacaatttttatctgttatttcaaattggtgtatgactccttagtccttagttcatttgtttgcacccagtcctgtcttaggtagttgattttatagttaggtaaattaatttctcgcactcttcgcttgattgtcatttatgggttgaactgttgaagtgattttatattttttaataaatttcacctgcaaaaaaactcaccattagcatacgccccccccccccccccccccccctctcccaaaaaaaaaaaaaaaacgaaagaagattaattagaaagaataaggtcgtgaaatgatgttacaaataaggcatatcagaatcagacgcaagggaagaataaaaacgttacaacaattcgcgcacaatgcaccccaaaaaaaaaatgacaggcacacataccttaaggaagaagaatcaacgctttca

SEQ ID NO: 160 - DNA, 5725 bp, Artificial Sequence
  Synthetic polynucleotide
ataaatggtagaaatctgtgggttcaaatgttcaattgctggggatcttcgtgatcatgatgattcatacacaatctctagaaacacgtacgcaaatattaattaatcaatttcctttttatagtctcctcacaattcacatgaaacttcatactctattatccgattccatttccatcgtatctttgaatttgacatttgtttgcccaacatgtaattaactttcccttctcatcttaaagatgtaacatgatatatattataacttgtaattaacccaatatttttaactctctatttttacactcatctgacatgtatttttatttttcatttttttttcttatcacatcacctcttacgtgtacaatttttctctttttcttatttctgtcttccataatagtaattaatattcatcggtccgatatgtatacagcccaaaaaagtgtgtaaaatcatttttgtatttctaaccctctctttctcatgcaagctagcttcttctttctatttatagcccttctcccttcacccaccaacacaccacaactccaaactttttcctcttgttctcttcttcttcaacacaactagtcataatccagctcatctctctctccctctctctttgttctctctttctctttctccaaaatggctctaaactacccttttttaacctacttcatactactgcttttgatattcactgtgggaaaaactgagcaatggaaagctccgattctaccagagcttgacattgataacatatcccacaaactgcttcaagggactatggccatttaacgcatgaattcccattagctgtgtttcgtccatcttctatagatgacatagtcaccttgataaaatcttcgtacaatagctttgccccttttgacatagctgcgaggggccaaggccactccactcatggacaagccatggctcgtgatgggattgtggtggacatggccagcctaagaaaacaaagaaatggggttgcgattagtgtctctaaggaccctttgatgggtcactatgctgatgttggaggggaacaactctggattgatgtgctacatgccacacttgaatatggacttgcaccagtttcttggactgattatttgtacttgaccgtgggagggacactttctaatgctggaatcagtggccagagcttccgttatggacctcaaatcagcaacgttcatgaaatggatgtcatcactggtatggagttagttgttttttttaatcaataaatgttaatattattagcttgttagttttttttgaaaaaattgaattaactttcgtttcctcttttctttctttttttaaccacacaattaatctaataactactggtattaagttagtttattttccatttttcatatataagttaggatttctaattaaaattgacatttcgtaccaccactacaaaaaaataatgtatcagtggcacaaaaaaatatattggcatcacttgtttttttagtcattaatattttgtagcatcacaaaaaatatggtgacaagttttctaaaaattacaaattaactgattcgtcagtgatgttaatgattttttagtgcgtcttggcaactaatgttttcatcttatataaaattagaaacaatagcggcaacagcacctgacattgtgtttgtgttttgcgtgtttctatcgcctaatttttgttgagaacgtgttcgtgaaacttggaaaaagagaaaattgaaattttcttgagatatctaccacttaagaaaaacaaatggctgtttccgttttgtctcttatgacatgacatggtacgtcatagatgaagttctgctaaatatatttgatatgatttcttgaacacgttttatatattcccacttcccagttagtgtggttgttgaatctaattaaaacaggaatagtctttgtctacaatatgggtgagcgatgcaaactttccaagggtttagaagttagaactatataggtccacggtcataattttatattcttgattaactttatgttggttaagtcgttcatatttggtcaattcattcatatgagaaaatactgaaatacaaacatggaaaaatgttaattactcttataattggcgcatgcatgcatctaaattatatgattttaataaatagtttttgtcatctacttgatttcaggaaaaggagagttcgtaacatgctcttcacagaagaacttggagttattccacgcggttcttggaggcttgggacaatttggagttatagcaagggcgagaattgctcttgagccagcacccaaaagggtacgtttatagagaattgactagaattttgtcttgtagcttttcctccaccaattcatatagtgacacctaatcgaattgtcatttttttttacggtgaattgtcattttgtaaatctaccaagtggtagttggcacccatatatgtatgaactatagtaccatacatttcattttatgttggtgtgttagtcatccatgatgaacacatacacaaatgaaaataggacgagttatacgtacgtaagggtttgaatcactgaatgtggatttttgaagttgaaagcatattaatcttggtttgaaaaagaaaaaaaaaatcggaagtccctcttgaagttatcatgactcttatattaagccaatagaattagaaaaactataattatgaatgatcatgttaattctttcagtgacttaaaatcttatctacaaaaagtacccttttgaaaaagaccttcacttaagtccatgcatacagtactaatcttacatacttgagagttgagacttgaagcatgaggagatttgaagtctggagaaacaagccaccacatattaattactaccgtattcttatctttatttatccttccaattttgatgggactggttgcacatacattcatacatactaacatacataaatacgtctctctctcatgtatttcattttattatattctatttcgttagtaagtttactagtataagacattattaatggtgaatttttgttggcatgcaggttaagtgggtcagactactttatagtgacttttctgcttttaccaaagaccaggaacgattaatctcaatcaatggaaggaaacaaaagaacgcattggattttctggaagggatgctgctaatgaaccaaggccccataaataattggagatcctctttcttccctctatctgaccatcccagaatagcttctttaataactgaacatagcatcctctactgtcttgaagtggctaaatattatgacgaacaaaccgagttaaatgtggacaaggtaacctcgtctagtcatatctattatatatagttagatcttgtcacatttctttgtttaaaaaataaaataaaaggcacaatcccaaaaagtcaaaagcaaatgcctagatattgtgtgttttcttggatattaattattacaccttaataacccataataatttttttatttttctttgtctctgtaggaaattgaagttttgctccaaggactagcctatatccctggatttaattatgagaaaaatgtctcgtacgttgagttcttgaatagggtccgaagtggagagttgaaacttcagtcacaaggactgtgggaagttcctcacccgtggcttaatttgtttataccaaaatctcaaatcttggattttaattcaggagtattcaaagatatagttcttaaaagaaacatctcctctggaccagtcttggtttatcccatgaatagaaacaagtaagccttgaatgcatgaatcacaatctagtgtcattataattcaggagtgtgtgatgcaatcttttaattttctgaccattcaactcaatatcaattttatttcttttttcaattaaaatgcaaaagagaataataattaataatatgaaatttaattccaggtgggacgataggatgtcagcatctataccagacgaggatgttttctacacagttgggtttttgcactcaagtgggtttgatacttggaaggcatatgatgctcaaaacagagaaattttggagttctgtagagatgctggcatcatggtcaagcaatatcttcccaaccacagcacacaagaagattggacaaaccattttggtgctaaatggatgaaattcttagaaagaaaacatcagtttgatccaagaatgattctatcacctgggcaaaaaatcttccacaaaaaattacagccagtgttttaaatattttccctaataaaaaaagtaaaaatgttttgtggtgggactacctcaattagatggctagctagggacaggtgtacatacagtgtgaccaagaccaagatggcttttgtatgctaaagtttgcattgctagctagagaaattaataaggtggggcattaaaggctgcatgagtacttttggcacctattatgctacatattaccttagatacgttaggttgacaaagtcgtactggtaggtacaagaagcacagttgtctctcacactgtctgtcacccaacttgctatatagtgtgtggagaaattcggatcatattgaagatgctgtgagttatagtcctccaatattaaatgtttaacgattctgtctttctcttatataattttgttttgcattatattactttcgcactggtgcaaacatatatatcaatgattataattaatttatacaatgacgagtataattgtacccaagttgcatgccataatatttgtcaaaaacaaaaagttgtatgccataatcaatccaggttgctagataataagatagatatgaatatgataacataaaatgctattaaagcaacaaataaacaataacacatagtccttatagggttcataattgatcgatgaacctagctagacgttgattttaggttaatttccagcgaggataaaatttattatataaagaaataactaaccaacacaaaataataaaaaattaaaaaaaaacgaagaaacttattttagagatataatttgttttagtatttgattgtaatttgagagattagctaggctctcaccaagtgagatctagagtatattcttaagaaaatatttataataaagaacccttaaacattttgcaaaacaaagggtggaattaatattaacaacaataattataatatcttgaaaattttatgaaaataatatatatatatatatatatatagagagagagagagagagagagagaaaattctcacaaacaatttttatctgttatttcaaattggtgtatgactccttagtccttagttcatttgtttgcacccagtcctgtcttaggtagttgattttatagttaggtaaattaatttctcgcactcttcgcttgattgtcatttatgggttgaactgttgaagtgattttatattttttaataaatttcacctgcaaaaaaactcaccattagcatacgccccccccccccccccccccccctctcccaaaaaaaaaaaaaaaacgaaagaagattaattagaaagaataaggtcgtgaaatgatgttacaaataaggcatatcagaatcagacgcaagggaagaataaaaacgttacaacaattcgcgcacaatgcaccccaaaaaaaaaatgacaggcacacataccttaaggaagaagaatcaacgctttca

SEQ ID NO: 161 - DNA, 7390 bp, Artificial Sequence; identical to SEQ ID NO: 132
  Synthetic polynucleotide

SEQ ID NO: 162 - DNA, 3593 bp, Artificial Sequence
  Synthetic polynucleotide
cttctcatccaatctaatagcaggatacgcgatgtttacattccgacaatagtggactcagtaccaacaccataaaaaaaaataaacaactagttatgtgtccataggggcaaaagaaaaagaaatacgcactactgtggaaagaagaaaaaaagcaataaggacttatttctatatccggaaaaagcatatatccttaaattggttaatgaacaaaaacttgaaacatgtctttccttcatgtttttgttgtaacttataacataacatgtaattgtttgtggttaccactgtttggaaaaagttgaagatttgtgagatctctcattgatgttacttttcctcttcaacttggcttctgtgtcactgtacatgtgatgcctttggcgtctctcttccttccaagtaagcagtccacatacgcattctcctcgtatcgtatgtcataagtcatgactgatcaacaatgctacgttgaccaagccaccacccacaaactcctttaaattctggcccaaacccttaagttcctgcattctccaatccatcactttctccttttcctcgtgttcacaaaatcacgctgcttaattattccttcaactaccatcatatcataccttctcaacagaaaaataaaaataaaaatgagatacatccttggagaacacaacattctgttcctcaaaagcttcgccattattccttagttgcatagccattcggcttaacttgtgtctttccagcatcccttatgcagcaagggactttggcaacaggtaccaatataatccaatggcagtgctgcaaccagaatcagtttctgatattgtagccaccataaggcatatctggctgatgggtcctggctcccacctcaccattgcagcgaggggccacggccactcgctgcagggtcaggctcaagcccatggaggacttgtgatcaacatggaatcactcaaggtcccagaaatgcaggtatatcgctaaatattaattgttaatcgttaattttttgttagctaggcaatcaaatccacaatcttttcctctcttccttcttcttatacaaccaaactaaccttataactccaatgcagatacatgttgatgagggaaacaagtctcctccatacgtggatgtctcaggtggcgagttgtggataaacatattgcatgagactctaagatacggcttggcgccaagatcgtggacagactacctgcatctcacagttggtggcactctctccaacgctggtgtcagtggtcagacatttaggcatggtccccagataagtaatgtacagcagctcgagattgttacaggtttgtgaaaaagagaatgaataataattgtttgtcttttctgaataataattcatttgatactggctgcatataagttttctaataaataatttttttcccctactttgatgagtaaaacatggtcaatgaatggatgcaggaacaggggaggtgttgaactgttccgcggagaataatggggatctctttcatggtgttctagggggcttggccaatttggcattataacccgggcaagaattgtcctagaaccagcacctaccatggtaatgcatcactcatcagtgactataccaaaacaagcttctttttttttggttttaatgtgtgctttgggtcatgactgaaaattttctatttattggaacaggtaaaatggattagagtgctgtactcagatttcacagcattcacaagagaccaagagaggttaatatctgcagaaaagacttttgactacattgaaggatttgtgataataaacagaactggtcttctaaataactggcgattatccttcaacccacgagacccggtccaagctagtcatttcaagtcggatggaagaactctcttctgccttgaaatggccaaatacttaaacgtggaagaaatcgatgcagcaaatcaggtgaggccagcaacactcaatctaatagatttttttgaaaataaagggataattaactccaaggttttaaaatatgagaccgtgggttgcaacatcaaagttttctaactctttgcgacccgaattgagactatgtcgatagcatttgtctatgatttgcccgtgatatcaacaaacacgaccaaaccacatgcgactgcgacctatatttaaaaccttgattaactcattagtgataatctttctttaggaaagaaaataaaagaggctaaatcaaccgtatctcacttttgtgtgtgcaggaagttgaggaacatttgtcccgtttaagctacatcccatcaactcttttttcaacagaagtcacatttgtagatttcttagacagggtgcacatatccgaggtcaagttgcgttcaaaaggcttgtgggatgttccacatccatggctcaatcttctaatacccaaaagccaaatactcaactttgcacaagtcgtcttcgggaacatcctatcagaaactagcaacggccccgtccttatctacccagtaaacaaatcaaagtaatgaatggttcagaaaaaaacatactattaactctagaaacaaatattttagccgtcaatattttttaattgacatgttttgttttgtttgcaggtgggacaacagaacttctgttgtgattccagaggaagatattttctacttagtggcatttcttacatctgcagttccatcttcaaatggaactgatggcctagaacacatactaagtcagaacaaaagaatattagaattctgtgaaagagcacaacttggagtgaagcagtatttgccccactacaacacacagcaagaatggagggcccattttggtcctcaatgggagacttttctgctgagaaagtccgtttatgatccattagcaatactcgcccctggccaacgtatatttcaaaaagcaataaccttctcatgaccacatttttattattaattattaaaaatctgaaaaaaaaaaagagaagaaaagtccttcatggcatgtgccaaaatgaaaaaaaaatgttatatgatccagacaggttttgacattgaccatacagaatgcaattgcaaaggaagaaggttcattgatagtagagaaaaagagggagaaaaagagattacaaaatgatgactggtgagatttgtatgccttgcaggttaatgaggaaagttgtcagtgtatgtaggtatgtaccattactgatggaaaaattgccttacgtgctgagtgtagcaccaaggcagcagggtccggctgagattagatcaacaaaacacattaatcattgtagggtttccaaagaacttataaatattatcagcgctagagccaatgtatagtactatcaattttgtaaacactcccttatttgttctctgtctcacatgtatccaaattcattaagattataattaaatacagatatttatgcatccaccacaaaaagatatcaatacgttcgcaacaaatacagataagatgatatataatgctgagtaacaaatactactattctagaaaattgcggaaaatgatataaaaatgggtatgcctaccctgaaggatgatgaat

SEQ ID NO: 163 - DNA, 8209 bp, Artificial Sequence
  Synthetic polynucleotide
ctacttctagaatgacaactactcctatggcaatatcaattgttagcggtggttcccttaagttcgagactaagggcagtctccaaaaggaagaaaggaaataacaaacttaagcctgaatgttctacgttttatttagtgtctcttgatatttaaaggtctatcaaatatgtataataaccgcacttccactataataaccacactcccactacgataatcgctacaataaccaccacaataactacttctaggatgacaactacctctatataagtttccatgacagaacatcttcttcctaacaccttacctatcacaaatgcttctcctctcggtgtcagagagtactattgattccctaagttctgacggtgtctttttctaaccaaagatccacttttcgaaggtcccgagccaattcgatgagagctcggaggcatagaactcggtttagtcacttatgccatgcttcatttcgtcgcgcgtactttaccaatcaacacacgccatcgagattgatctgcaagtgcagattacgtaagcgagaaaggatttgcaatggaattcacaaatcgcacaatcagagaacaggataagtgtactgctaattatgagcgccagggagtgtagattcatgtcttaggttttaaaattagaacagaataaatatgaaaattgttttttactttctatattttatattttaatttttttttagtttttattattagtaatattgttaattataattaattataaaaattttaacaagtaatttattactaatttatcataagataatttataataaaaaaataattgataatttataattaatttataactaattatttttatattttgtttagtaaagactaaaaggtaattaaaatgtaaattatagagattaaaatatcatttttaaactataagaactaaaaaagaattaaaatacaaactataagacaaaaaagatcacttttaaactataggaactaaaaaaattacttttaaattatatggactaaaaaataccaatcgtaaaattataggaactaaataaataatataaccttaaattttttattttaagatcaattttttaaaaaattaatgttaatcatgatattttatttataaaatatcaaaactcattttgtaaaatggattttcatcaaaataaacgttcactttgctatggtaaatcttgttttgtagtattttggttgttctgacccaaatgacccaaatgcaggctagtggacaatgacattgattgttttgtatatgggttgggtgtcccttgtatcctattgatatattccttttgccttattaagaaaaattgcattagaaactactatatattaaatgctctaacaattaatgattaaattgacaccacatcctgtttgactctccacttttcttttattggtactctctattttagtctgctctttatatacatgttaacttaaagacagcaaatttaccaaagtaacttatcttctctcttgaaagaaaaatgccacagaggaatttagtactattttccacaactatggttgtgctgctatctagcatagtgctcacacaagcacaaccacgatcatggtcagcattccaagcatccaaagaactagccacaaagcttagtggcaattttcaatccatcttctgttagtgacatcttggccttgatacatttctcaaactctcttcctaacccattccccatagcccctagagggaaagcacactctgttcatggacaagccatgacaaaagatggggtggtgttgaatatgactaacctcaatagcagttttcaaaatgggttaggggttttggtgtctgcttgtgatggaaaaggtccattgatttgttatgctgatgtaggtggtggccaaatgtggatcgatgtcttgcatgcatcccttgaacgtggactcacacctttgtctttgactgattatatgtatgccactgttgggggcacactatctaatgctggcatgggtggcatgtcctttcgatttggacctcagatctctaatgttcttgaattggatgttattacaggtatgactcactcaattttatcaattaattttcttccatactcatctacacgcttgttcgaagtgaaacatttaactgaattttttttatcttggatatcacaattgtgtaatttttcgtctagatttgtgattatgttaattcaatctgtatatcttaataattatattaaagtccctccctccttcaattatctgtcaaatatttaacgaaatatatttatgtgacatttgagaatgttgatgggtttatatgtgttattttagtcgattagattttacgtgtgaagttttagtgtctcccaaattcttattaacattgtgggaaaaaatgagaaaacaatcgcagaactggagtttgattccagattattattattatttagtaattttattattatctatatcataatagtatatttattaactcatttaatatcatatttattacatatatttagtgtaataatagtatatttattacattctttttacatacaaaaagtcagaaagacttaaaagcttctacaaaaagaaatacctgttatatcagctcttaaagaattacatatgaaatcctacgcatttattacacacacacaaatatatatatatatatatacttaaacagaaatatgaattgttattatatttataattagtatttatattaatagaacaatttatagtttatactatggaataaatttttaaatataaatttattatttatattgatatactcatttatagtttttactaagatataagtttataaatataaatttgcacctcttgtgattttgaactggttttttaataaataaaaaataaataaaaagattataaatataaattattattacattaacataataatttacatttattaatttaatactaaatatatatagtaaatgtatcattaaatgaatgtagtaaacatattattaattttcagaaaagttttaatactttttcaccctagaaatatacaaattttttttaattgatataatttttttttgtttatgattcttgtattaatatttaaaccttccgttggagattaacgggtaaaaaatacaaggtttaaacattatataagtaaagttttcttacaacgacaaaacaaaactaattaatatatttacagctaatgatgtttgtttaaaaagtgctaattatatttttttgttctagtcaatgttgtatagttacccaacatataatcagtgacggactttttagttgtggggaaatattcattatatatatatatatatatatgaatcggtgctgcatataatacaatatatacaattttacactgaaaactgtatattattaaaatttatcaggaattatgcttaaatatcttattgtatctatcttattaaagaaatctaattatatctataaaataaaggtttatttcgatcgttttgatatattgtaaatattattttttttgtttgtttttctcgtataaactttaatacatctatatatgtggcttttatatatagggaaaggagaccttgtgacttgctccaaggagcagaactcagaggcattttacgctgctcttggaggattaggtcaatttggggtgataacaagagcaagaatacctctaggacctgcacctactagggcaagtattagtttcccctttcatatagatttcgtaagggtgaaaataaaaataatattttataggactaaaattaaactaatttcatataaacctaaattaaaactcactcaaattatagatgtattaaaatcatatttaatctatatatatgccatttaattttaattgaaacatacatattatatatagatcattttttcctgtaaacttagtcttagacactatacaacttcaatactattaaaattgtaccaaaattaactatcttaaaactaaaaatgagaataagtcgggtaattgacataagtctatgagctcacttgtttaaagcttggtctcatctatctaataaaaaaagttaaacttaaactttttaaaaagtctatttatttatataatttagacttggacttgtgaaaaaacttattaaactgtatagaccggtctaattattcatttaaatatagtaaaacattaaaatatattatacttttattttaatatcttaatatgttaatatatttttatcataaataaaatgaatatttgaaataaatagatctttaaatatgtaataagctaaactatatcatatcttaatttttataacatgccatacctatatatttatataacgtctaacttgacctaacatattatcacccctacttaaaaattatttatctatttatttttaacaaagtttttttcatgtgggtgtttgcaggtaaaatggctccgcctgctatacaacaacttcactgcattttcaagagaccaagaacatttaatatcgttcagtgaaaggaatgacattgctacagcagattatgtagaaggcatgcttctattgaatcagccgccactggatcttctcttttatccagcttctgatcatcaaagggtaacttccttggtaactcaatatggcattatctacatcttggagcttgccaaatactattacaataactctcaggcacatgtcaatgaggtaacttgaaataaaagttgtttttagcatctagttagaaacttcttttatttttattcttatttttttatggacaacatatataatgaatttagtaaagaaatacagagatattctaattgttatatattcatcatacatcaaagatcaaattaatcctcctgattgaaaagaattttgttttcatgaatccaaaagaaacatgtctcaaactcactcaaattgtatggaacccatatattaattaatttatgtacaattcattgttttttactaaattgattatttttcttgtttcttaaataggaagttgcatatttgctgaaagggttaaactttgtacatacatttgtgttcgaaagagatgtgtcatacgaggagtttgtgaacagagtttatcctttggagcaaatgcttaggtcagaaggactttgggaagttcctcacccttggctgaacctctgggttccaagatctagaatctcagattttgatgaaggtgttttcaaggacattgttcttaagcaaaatattactggcggaagttttctagtctacccaacaaacagaagaaacaagtaaattgattagattatttatttttttgtgagtgtcaaattattatctagatcacccgtctcctttaatttacatatcctttctagtgtttccaatatataaaaaaatgacacctcactaaaaaaaataacaaataagagaatttattgttttttaaccacatttttttattgagagaaaacactccacaagaaaaataataataacaacaaaataatttatgtaatttttaaaagaaaaggtcacttaaatttttgcaactctaaaattagttattgaaaaaaaaaacctcaagtctcacatttactagaggaacctcctaagttttttctaaaatgaatatatttctaaaggatatgagacttaaagttttttcaatattaatttacaacattgtgctctgattcaaagtcaagcaatctcctagaataaaagagattgaaaatagcactaacactattggtggggtttgtggtttgtggtctgtggatttaaatttggcatgtggtatttaacagaacttcaacagaggtataaattataaaagatttttttttctgagaaaaagaaataaatggaggtatgttattaaaagagggagtatgaataacaactgtcctaataatactccattgggcctgacagtaggagttgggccataacaattagggacaaaaaataattttggttactaaatttagtcaataattccttttcttagtcacattagatgtttctgttccaatttatttgcttatgtaaatgacttaatttatacatatgtgaggattaaattgaatcaacattatgcttcacaggtgggatgataggatgacaccaattacacctgacgaagatgttttctacgttgtagattttttgcgtgttgctaaaacgtttgatgtggtggacaaactacaggttcaaaacaaacagatactgcggttttgtaatgatgctggtattaagatcacagagtatcttatcgggaacaaaactcatcaacaatgggtggaacactttggcccaaaatggaaactttttgcagatagaaaaactgaatttgatcccaaaaaaatattgtcacctggacatgggattttccagtaaataatgtgctaggtttcagtgaaatctctcattttggaaattcatgaaataaaaatgaaattctgtaccagaaaaaaaaaaaaaaacttgttgtgtaattctgtgccaaacatacattgaattggattgaagttattatgcaattttgtacgaaaaaaaacttatgtatttgattattttatgtttttttattaatgttgaatgttcaaatattctcatgactcacgaacaacggcagatctagaagaaaaaaatggtcgtaagatgtgttgatggtatttaaatgaatgcatgtctacttcaaaatttatttgatagactcatttcgtaaaaaaaaaaaatagaaataacctatttaacaatacttgtttggaaaataaatttaaaaataagaaatttggtcgtttttttatatagaaaatagcattgtttttatgatattttaatgcaattcacgattttatgttgttgggtttttaaataaataaaagttacataaaactttagttttaaattttctttgggactgtgaatggagttaaactctaaaaaagatctataattccaaagtcaggttaccatcaaatattgacatatagcaaaaaaaaaaactactcccttgggaaaattatataaaatattaccttgtcaagagacttgcatttatacaaatgatttatttagcaaaattgttgcatcatgatcaaataggacaaacgttgctaaatcaatgtcactaggcattggcacccttacaagttacaagatacctttaagaaatcgaaaactatttttttcaaaccctttgttttgtgaattaactctttatgagctattttatccctctcaatcggaatataaagagatttttccttacatgacactagtggtctgatcctaagtttgagcttgctcgatgataagcaatgattttaagttttgggtgagaatatataaaaacattggttggagcgttttttgtttttatttttaaagaaaataaaaaataagaatgaaaatatatttatttaaaatttagaaaatattttttctgaatatatttttgaaatagaccaaaaactgaaaataataaatcaacattttcagtcttgtttgaaaaggtgaaaacagcgtggtaccttagagtgctttcttcttaatacattttttttaatcttaaaaatttgaaaatgaaaataaaaaataaacgctcaaatcaagctccacctaaatttttctctattgcaaatgttgaaaaaaatggaaaagcaaaagatctcaaagtaaaataaatatattgtcttttgttacattttgtttcaatgattgtggggaataattgaggtaggataagtggtaggaaaaaatatcaagcaacggataatggtaattgttttatataaaggtttaaatatatttttagtcttttaatttaaaattattattattttttagtccttaaaaacaaatatgcaaattttagtaatctaaaattttaaaatctagttttagtcttgttttgttaactctataacagaggttgtctgtgtggaaaatgatgtgcaattttgtggcgatttctttagtgtgaaaattttgttttaaatttaaatcaaacaaaatgtctcgcaaggcaacaataacgttgttgctgctaacaatcttcgtgtggcaaaatcaacagtggagaaaacgactatcaacaatgttagagaagagttgacgaaggaaaatggggaaaataggacaaacccgaacaaaaaaaccacccttgacttg

SEQ ID NO: 164 - DNA, 8248 bp, Artificial Sequence
  Synthetic polynucleotide
ctacttctagaatgacaactactcctatggcaatatcaattgttagcggtggttcccttaagttcgagactaagggcagtctccaaaaggaagaaaggaaataacaaacttaagcctgaatgttctacgttttatttagtgtctcttgatatttaaaggtctatcaaatatgtataataaccgcacttccactataataaccacactcccactacgataatcgctacaataaccaccacaataactacttctaggatgacaactacctctatataagtttccatgacagaacatcttcttcctaacaccttacctatcacaaatgcttctcctctcggtgtcagagagtactattgattccctaagttctgacggtgtctttttctaaccaaagatccacttttcgaaggtcccgagccaattcgatgagagctcggaggcatagaactcggtttagtcacttatgccatgcttcatttcgtcgcgcgtactttaccaatcaacacacgccatcgagattgatctgcaagtgcagattacgtaagcgagaaaggatttgcaatggaattcacaaatcgcacaatcagagaacaggataagtgtactgctaattatgagcgccagggagtgtagattcatgtcttaggttttaaaattagaacagaataaatatgaaaattgttttttactttctatattttatattttaatttttttttagtttttattattagtaatattgttaattataattaattataaaaattttaacaagtaatttattactaatttatcataagataatttataataaaaaaataattgataatttataattaatttataactaattatttttatattttgtttagtaaagactaaaaggtaattaaaatgtaaattatagagattaaaatatcatttttaaactataagaactaaaaaagaattaaaatacaaactataagacaaaaaagatcacttttaaactataggaactaaaaaaattacttttaaattatatggactaaaaaataccaatcgtaaaattataggaactaaataaataatataaccttaaattttttattttaagatcaattttttaaaaaattaatgttaatcatgatattttatttataaaatatcaaaactcattttgtaaaatggattttcatcaaaataaacgttcactttgctatggtaaatcttgttttgtagtattttggttgttctgacccaaatgacccaaatgcaggctagtggacaatgacattgattgttttgtatatgggttgggtgtcccttgtatcctattgatatattccttttgccttattaagaaaaattgcattagaaactactatatattaaatgctctaacaattaatgattaaattgacaccacatcctgtttgactctccacttttcttttattggtactctctattttagtctgctctttatatacatgttaacttaaagacagcaaatttaccaaagtaacttatcttctctcttgaaagaaaaatgccacagaggaatttagtactattttccacaactatggttgtgcatagtgctcacacaagcacaaccacgatcatggtcagcattccaagcatccaaagaactagccacaaagcttagtcgtaaccctcaaacctttccacatgcctcaatagttcacaaaaccccagtggcaattttcaatccatcttctgttagtgacatcttggccttgatacatttctcaaactctcttcctaacccattccccatagcccctagagggaaagcacactctgttcatggacaagccatgacaaaagatggggtggtgttgaatatgactaacctcaatagcagttttcaaaatgggttaggggttttggtgtctgcttgtgatggaaaaggtccattgatttgttatgctgatgtaggtggtggccaaatgtggatcgatgtcttgcatgcatcccttgaacgtggactcacacctttgtctttgactgattatatgtatgccactgttgggggcacactatctaatgctggcatgggtggcatgtcctttcgatttggacctcagatctctaatgttcttgaattggatgttattacaggtatgactcactcaattttatcaattaattttcttccatactcatctacacgcttgttcgaagtgaaacatttaactgaattttttttatcttggatatcacaattgtgtaatttttcgtctagatttgtgattatgttaattcaatctgtatatcttaataattatattaaagtccctccctccttcaattatctgtcaaatatttaacgaaatatatttatgtgacatttgagaatgttgatgggtttatatgtgttattttagtcgattagattttacgtgtgaagttttagtgtctcccaaattcttattaacattgtgggaaaaaatgagaaaacaatcgcagaactggagtttgattccagattattattattatttagtaattttattattatctatatcataatagtatatttattaactcatttaatatcatatttattacatatatttagtgtaataatagtatatttattacattctttttacatacaaaaagtcagaaagacttaaaagcttctacaaaaagaaatacctgttatatcagctcttaaagaattacatatgaaatcctacgcatttattacacacacacaaatatatatatatatatatacttaaacagaaatatgaattgttattatatttataattagtatttatattaatagaacaatttatagtttatactatggaataaatttttaaatataaatttattatttatattgatatactcatttatagtttttactaagatataagtttataaatataaatttgcacctcttgtgattttgaactggttttttaataaataaaaaataaataaaaagattataaatataaattattattacattaacataataatttacatttattaatttaatactaaatatatatagtaaatgtatcattaaatgaatgtagtaaacatattattaattttcagaaaagttttaatactttttcaccctagaaatatacaaattttttttaattgatataatttttttttgtttatgattcttgtattaatatttaaaccttccgttggagattaacgggtaaaaaatacaaggtttaaacattatataagtaaagttttcttacaacgacaaaacaaaactaattaatatatttacagctaatgatgtttgtttaaaaagtgctaattatatttttttgttctagtcaatgttgtatagttacccaacatataatcagtgacggactttttagttgtggggaaatattcattatatatatatatatatatatgaatcggtgctgcatataatacaatatatacaattttacactgaaaactgtatattattaaaatttatcaggaattatgcttaaatatcttattgtatctatcttattaaagaaatctaattatatctataaaataaaggtttatttcgatcgttttgatatattgtaaatattattttttttgtttgtttttctcgtataaactttaatacatctatatatgtggcttttatatatagggaaaggagaccttgtgacttgctccaaggagcagaactcagaggcattttacgctgctcttggaggattaggtcaatttggggtgataacaagagcaagaatacctctaggacctgcacctactagggcaagtattagtttcccctttcatatagatttcgtaagggtgaaaataaaaataatattttataggactaaaattaaactaatttcatataaacctaaattaaaactcactcaaattatagatgtattaaaatcatatttaatctatatatatgccatttaattttaattgaaacatacatattatatatagatcattttttcctgtaaacttagtcttagacactatacaacttcaatactattaaaattgtaccaaaattaactatcttaaaactaaaaatgagaataagtcgggtaattgacataagtctatgagctcacttgtttaaagcttggtctcatctatctaataaaaaaagttaaacttaaactttttaaaaagtctatttatttatataatttagacttggacttgtgaaaaaacttattaaactgtatagaccggtctaattattcatttaaatatagtaaaacattaaaatatattatacttttattttaatatcttaatatgttaatatatttttatcataaataaaatgaatatttgaaataaatagatctttaaatatgtaataagctaaactatatcatatcttaatttttataacatgccatacctatatatttatataacgtctaacttgacctaacatattatcacccctacttaaaaattatttatctatttatttttaacaaagtttttttcatgtgggtgtttgcaggtaaaatggctccgcctgctatacaacaacttcactgcattttcaagagaccaagaacatttaatatcgttcagtgaaaggaatgacattgctacagcagattatgtagaaggcatgcttctattgaatcagccgccactggatcttctcttttatccagcttctgatcatcaaagggtaacttccttggtaactcaatatggcattatctacatcttggagcttgccaaatactattacaataactctcaggcacatgtcaatgaggtaacttgaaataaaagttgtttttagcatctagttagaaacttcttttatttttattcttatttttttatggacaacatatataatgaatttagtaaagaaatacagagatattctaattgttatatattcatcatacatcaaagatcaaattaatcctcctgattgaaaagaattttgttttcatgaatccaaaagaaacatgtctcaaactcactcaaattgtatggaacccatatattaattaatttatgtacaattcattgttttttactaaattgattatttttcttgtttcttaaataggaagttgcatatttgctgaaagggttaaactttgtacatacatttgtgttcgaaagagatgtgtcatacgaggagtttgtgaacagagtttatcctttggagcaaatgcttaggtcagaaggactttgggaagttcctcacccttggctgaacctctgggttccaagatctagaatctcagattttgatgaaggtgttttcaaggacattgttcttaagcaaaatattactggcggaagttttctagtctacccaacaaacagaagaaacaagtaaattgattagattatttatttttttgtgagtgtcaaattattatctagatcacccgtctcctttaatttacatatcctttctagtgtttccaatatataaaaaaatgacacctcactaaaaaaaataacaaataagagaatttattgttttttaaccacatttttttattgagagaaaacactccacaagaaaaataataataacaacaaaataatttatgtaatttttaaaagaaaaggtcacttaaatttttgcaactctaaaattagttattgaaaaaaaaaacctcaagtctcacatttactagaggaacctcctaagttttttctaaaatgaatatatttctaaaggatatgagacttaaagttttttcaatattaatttacaacattgtgctctgattcaaagtcaagcaatctcctagaataaaagagattgaaaatagcactaacactattggtggggtttgtggtttgtggtctgtggatttaaatttggcatgtggtatttaacagaacttcaacagaggtataaattataaaagatttttttttctgagaaaaagaaataaatggaggtatgttattaaaagagggagtatgaataacaactgtcctaataatactccattgggcctgacagtaggagttgggccataacaattagggacaaaaaataattttggttactaaatttagtcaataattccttttcttagtcacattagatgtttctgttccaatttatttgcttatgtaaatgacttaatttatacatatgtgaggattaaattgaatcaacattatgcttcacaggtgggatgataggatgacaccaattacacctgacgaagatgttttctacgttgtagattttttgcgtgttgctaaaacgtttgatgtggtggacaaactacaggttcaaaacaaacagatactgcggttttgtaatgatgctggtattaagatcacagagtatcttatcgggaacaaaactcatcaacaatgggtggaacactttggcccaaaatggaaactttttgcagatagaaaaactgaatttgatcccaaaaaaatattgtcacctggacatgggattttccagtaaataatgtgctaggtttcagtgaaatctctcattttggaaattcatgaaataaaaatgaaattctgtaccagaaaaaaaaaaaaaaacttgttgtgtaattctgtgccaaacatacattgaattggattgaagttattatgcaattttgtacgaaaaaaaacttatgtatttgattattttatgtttttttattaatgttgaatgttcaaatattctcatgactcacgaacaacggcagatctagaagaaaaaaatggtcgtaagatgtgttgatggtatttaaatgaatgcatgtctacttcaaaatttatttgatagactcatttcgtaaaaaaaaaaaatagaaataacctatttaacaatacttgtttggaaaataaatttaaaaataagaaatttggtcgtttttttatatagaaaatagcattgtttttatgatattttaatgcaattcacgattttatgttgttgggtttttaaataaataaaagttacataaaactttagttttaaattttctttgggactgtgaatggagttaaactctaaaaaagatctataattccaaagtcaggttaccatcaaatattgacatatagcaaaaaaaaaaactactcccttgggaaaattatataaaatattaccttgtcaagagacttgcatttatacaaatgatttatttagcaaaattgttgcatcatgatcaaataggacaaacgttgctaaatcaatgtcactaggcattggcacccttacaagttacaagatacctttaagaaatcgaaaactatttttttcaaaccctttgttttgtgaattaactctttatgagctattttatccctctcaatcggaatataaagagatttttccttacatgacactagtggtctgatcctaagtttgagcttgctcgatgataagcaatgattttaagttttgggtgagaatatataaaaacattggttggagcgttttttgtttttatttttaaagaaaataaaaaataagaatgaaaatatatttatttaaaatttagaaaatattttttctgaatatatttttgaaatagaccaaaaactgaaaataataaatcaacattttcagtcttgtttgaaaaggtgaaaacagcgtggtaccttagagtgctttcttcttaatacattttttttaatcttaaaaatttgaaaatgaaaataaaaaataaacgctcaaatcaagctccacctaaatttttctctattgcaaatgttgaaaaaaatggaaaagcaaaagatctcaaagtaaaataaatatattgtcttttgttacattttgtttcaatgattgtggggaataattgaggtaggataagtggtaggaaaaaatatcaagcaacggataatggtaattgttttatataaaggtttaaatatatttttagtcttttaatttaaaattattattattttttagtccttaaaaacaaatatgcaaattttagtaatctaaaattttaaaatctagttttagtcttgttttgttaactctataacagaggttgtctgtgtggaaaatgatgtgcaattttgtggcgatttctttagtgtgaaaattttgttttaaatttaaatcaaacaaaatgtctcgcaaggcaacaataacgttgttgctgctaacaatcttcgtgtggcaaaatcaacagtggagaaaacgactatcaacaatgttagagaagagttgacgaaggaaaatggggaaaataggacaaacccgaacaaaaaaaccacccttgacttg

SEQ ID NO: 165 - DNA, 5767 bp, Artificial Sequence
  Synthetic polynucleotide
ataaatggtagaaatctgtgggttcaaatgttcaattgctggggatcttcgtgatcatgatgattcatacacaatctctagaaacacgtacgcaaatattaattaatcaatttcctttttatagtctcctcacaattcacatgaaacttcatactctattatccgattccatttccatcgtatctttgaatttgacatttgtttgcccaacatgtaattaactttcccttctcatcttaaagatgtaacatgatatatattataacttgtaattaacccaatatttttaactctctatttttacactcatctgacatgtatttttatttttcatttttttttcttatcacatcacctcttacgtgtacaatttttctctttttcttatttctgtcttccataatagtaattaatattcatcggtccgatatgtatacagcccaaaaaagtgtgtaaaatcatttttgtatttctaaccctctctttctcatgcaagctagcttcttctttctatttatagcccttctcccttcacccaccaacacaccacaactccaaactttttcctcttgttctcttcttcttcaacacaactagtcataatccagctcatctctctctccctctctctttgttctctctttctctttctccaaaatggctctaaactacccttttttaacctacttcatactactgctagtaaccataaccgtttgatattcactgtgggaaaaactgagcaatggaaagctccgattctaccagagcttgacattgataacatatcccacaaactccatgatgaccctgaaaccattcaaatggcttcaagggactatggccatttaacgcatgaattcccattagctgtgtttcgtccatcttctatagatgacatagtcaccttgataaaatcttcgtacaatagctttgccccttttgacatagctgcgaggggccaaggccactccactcatggacaagccatggctcgtgatgggattgtggtggacatggccagcctaagaaaacaaagaaatggggttgcgattagtgtctctaaggaccctttgatgggtcactatgctgatgttggaggggaacaactctggattgatgtgctacatgccacacttgaatatggacttgcaccagtttcttggactgattatttgtacttgaccgtgggagggacactttctaatgctggaatcagtggccagagcttccgttatggacctcaaatcagcaacgttcatgaaatggatgtcatcactggtatggagttagttgttttttttaatcaataaatgttaatattattagcttgttagttttttttgaaaaaattgaattaactttcgtttcctcttttctttctttttttaaccacacaattaatctaataactactggtattaagttagtttattttccatttttcatatataagttaggatttctaattaaaattgacatttcgtaccaccactacaaaaaaataatgtatcagtggcacaaaaaaatatattggcatcacttgtttttttagtcattaatattttgtagcatcacaaaaaatatggtgacaagttttctaaaaattacaaattaactgattcgtcagtgatgttaatgattttttagtgcgtcttggcaactaatgttttcatcttatataaaattagaaacaatagcggcaacagcacctgacattgtgtttgtgttttgcgtgtttctatcgcctaatttttgttgagaacgtgttcgtgaaacttggaaaaagagaaaattgaaattttcttgagatatctaccacttaagaaaaacaaatggctgtttccgttttgtctcttatgacatgacatggtacgtcatagatgaagttctgctaaatatatttgatatgatttcttgaacacgttttatatattcccacttcccagttagtgtggttgttgaatctaattaaaacaggaatagtctttgtctacaatatgggtgagcgatgcaaactttccaagggtttagaagttagaactatataggtccacggtcataattttatattcttgattaactttatgttggttaagtcgttcatatttggtcaattcattcatatgagaaaatactgaaatacaaacatggaaaaatgttaattactcttataattggcgcatgcatgcatctaaattatatgattttaataaatagtttttgtcatctacttgatttcaggaaaaggagagttcgtaacatgctcttcacagaagaacttggagttattccacgcggttcttggaggcttgggacaatttggagttatagcaagggcgagaattgctcttgagccagcacccaaaagggtacgtttatagagaattgactagaattttgtcttgtagcttttcctccaccaattcatatagtgacacctaatcgaattgtcatttttttttacggtgaattgtcattttgtaaatctaccaagtggtagttggcacccatatatgtatgaactatagtaccatacatttcattttatgttggtgtgttagtcatccatgatgaacacatacacaaatgaaaataggacgagttatacgtacgtaagggtttgaatcactgaatgtggatttttgaagttgaaagcatattaatcttggtttgaaaaagaaaaaaaaaatcggaagtccctcttgaagttatcatgactcttatattaagccaatagaattagaaaaactataattatgaatgatcatgttaattctttcagtgacttaaaatcttatctacaaaaagtacccttttgaaaaagaccttcacttaagtccatgcatacagtactaatcttacatacttgagagttgagacttgaagcatgaggagatttgaagtctggagaaacaagccaccacatattaattactaccgtattcttatctttatttatccttccaattttgatgggactggttgcacatacattcatacatactaacatacataaatacgtctctctctcatgtatttcattttattatattctatttcgttagtaagtttactagtataagacattattaatggtgaatttttgttggcatgcaggttaagtgggtcagactactttatagtgacttttctgcttttaccaaagaccaggaacgattaatctcaatcaatggaaggaaacaaaagaacgcattggattttctggaagggatgctgctaatgaaccaaggccccataaataattggagatcctctttcttccctctatctgaccatcccagaatagcttctttaataactgaacatagcatcctctactgtcttgaagtggctaaatattatgacgaacaaaccgagttaaatgtggacaaggtaacctcgtctagtcatatctattatatatagttagatcttgtcacatttctttgtttaaaaaataaaataaaaggcacaatcccaaaaagtcaaaagcaaatgcctagatattgtgtgttttcttggatattaattattacaccttaataacccataataatttttttatttttctttgtctctgtaggaaattgaagttttgctccaaggactagcctatatccctggatttaattatgagaaaaatgtctcgtacgttgagttcttgaatagggtccgaagtggagagttgaaacttcagtcacaaggactgtgggaagttcctcacccgtggcttaatttgtttataccaaaatctcaaatcttggattttaattcaggagtattcaaagatatagttcttaaaagaaacatctcctctggaccagtcttggtttatcccatgaatagaaacaagtaagccttgaatgcatgaatcacaatctagtgtcattataattcaggagtgtgtgatgcaatcttttaattttctgaccattcaactcaatatcaattttatttcttttttcaattaaaatgcaaaagagaataataattaataatatgaaatttaattccaggtgggacgataggatgtcagcatctataccagacgaggatgttttctacacagttgggtttttgcactcaagtgggtttgatacttggaaggcatatgatgctcaaaacagagaaattttggagttctgtagagatgctggcatcatggtcaagcaatatcttcccaaccacagcacacaagaagattggacaaaccattttggtgctaaatggatgaaattcttagaaagaaaacatcagtttgatccaagaatgattctatcacctgggcaaaaaatcttccacaaaaaattacagccagtgttttaaatattttccctaataaaaaaagtaaaaatgttttgtggtgggactacctcaattagatggctagctagggacaggtgtacatacagtgtgaccaagaccaagatggcttttgtatgctaaagtttgcattgctagctagagaaattaataaggtggggcattaaaggctgcatgagtacttttggcacctattatgctacatattaccttagatacgttaggttgacaaagtcgtactggtaggtacaagaagcacagttgtctctcacactgtctgtcacccaacttgctatatagtgtgtggagaaattcggatcatattgaagatgctgtgagttatagtcctccaatattaaatgtttaacgattctgtctttctcttatataattttgttttgcattatattactttcgcactggtgcaaacatatatatcaatgattataattaatttatacaatgacgagtataattgtacccaagttgcatgccataatatttgtcaaaaacaaaaagttgtatgccataatcaatccaggttgctagataataagatagatatgaatatgataacataaaatgctattaaagcaacaaataaacaataacacatagtccttatagggttcataattgatcgatgaacctagctagacgttgattttaggttaatttccagcgaggataaaatttattatataaagaaataactaaccaacacaaaataataaaaaattaaaaaaaaacgaagaaacttattttagagatataatttgttttagtatttgattgtaatttgagagattagctaggctctcaccaagtgagatctagagtatattcttaagaaaatatttataataaagaacccttaaacattttgcaaaacaaagggtggaattaatattaacaacaataattataatatcttgaaaattttatgaaaataatatatatatatatatatatatagagagagagagagagagagagagaaaattctcacaaacaatttttatctgttatttcaaattggtgtatgactccttagtccttagttcatttgtttgcacccagtcctgtcttaggtagttgattttatagttaggtaaattaatttctcgcactcttcgcttgattgtcatttatgggttgaactgttgaagtgattttatattttttaataaatttcacctgcaaaaaaactcaccattagcatacgccccccccccccccccccccccctctcccaaaaaaaaaaaaaaaacgaaagaagattaattagaaagaataaggtcgtgaaatgatgttacaaataaggcatatcagaatcagacgcaagggaagaataaaaacgttacaacaattcgcgcacaatgcaccccaaaaaaaaaatgacaggcacacataccttaaggaagaagaatcaacgctttca

SEQ ID NO: 166 - DNA, 7390 bp, Artificial Sequence
  Synthetic polynucleotide
ttaaatcggttcaaaattgttgaatcgatccaaaactagtaaatacagtaggttaattgatttcacttgaaatttaaaaaaaaaaaattaaaatgacgtcattttagtttttttttaaattattataacttatatgacatttttaagtgaagtttactttttattattattaatttatgcatactaggtttctgaaatattatattaaaatattatatatatatatatatatatatatatatatatatatatatatatatatatatatatatatatattattaaaatcaattccacttcgattgagctattaacttttgaaccaatatcttccccagttcaatgaccatccaagtctgaaaacattggttaccatcaacgttacccttccgtgaattggaaaagttaatgcaatataggttgatccaaggataagtcctatggtcccagaaagaaaatcttgagagatccttttgataattacccgagtttttactctctccttttaattcacgaaattggaaacttcaattgctaatataaaaagaattttgttagccaatatcatcagggtattgtcaaagaattacaagaaaaaaaaattataagataacataaaaaaataaaaaacaacataattttatatattttaataaaaaattcttttaatttttttttatcaatattctatagttactggcatttgacatgtaaaaatgtaaacatatgaattgataaaatttgaccaatgtttgaccctgagataggaatccaacggccccagttcaattgcaatcttttatttttactacgtgaaggcccaacaatggagaaccttgtggattttattgctgagaatctgtggttacgatgatgacacaccaacacaatcacagaaagcaagtaccgtttggaaggcctaacacttcattaattgcttcattaaatttattttactttctagctgctcaatttaattgctttacacaaatacttcatgacgtttcagaaggagggccaaatacaatctctacaatggttccatcgtatctttgaatttgacatttagcatccctccctttgcacaatgtacaatttgcattttgaatatttttttctcaccttcatatcgtgggactacttctataaccatcctggtgaaaataaataaagcgagggaattacgtaattaaacatatttaaatttctctctcctctgtttaattaatttatcaaaaacaaatatgtgtgcgagtatttaaaaatgtgtaaagtattattattttttaatttttcttttttccttctcatcaatgataaatatactttttaatataaaaatcaaacaataactataaaaaaaacatcttcacttcaattcaacattaaataaaaaataatccctgctttgttattttttacccaccaattatcatatttgttatttattatttttttatgttcttgctataaaggaaatcactatttgactcacacaaaactataaaggaatcaaataatcaattattatttaaaaactctattaaaataacaattacaacaaaatcccttatttttttcttccttatcattattaaaccttcccattctctctttctatctctacatgtttttctcaaattaaatattttctatatcctcctttatcatgcaaattaaagtcctcttccattctatatatagccgctacctcctccacctcctttccccactacaacacacaaacaccaacaaccaaatcaatccatccaccctagaaacaacaaagcactctctcttctctcattctattatcttctctcatcctcttattctctccaaaccaacaaaaaaaaaatggttgctgagaactacccttctcccacatacttcatcctaaccataacacgtttgatctccacagtgggcaaaacctcccaatggacgaaggccctgtcgctgcctccggaactcgcctccgtctccctcgacgacaccatcttctgcaagctccgtgacgacccagaggccctccagggaagggcctccagggactacgggaacctcgtccgcgaggttcccttggcagtcttccacccagcctcagcgagcgacatcgcgaggctgatcaagctgtcgtacaacggctctgtccccttcaagattgcggcgagggggcaagggcactcgacaaggggccaggcgatggcacgtgagggggtggtggtggacatggcggggttcagagagagagggaatggagtggggataagggttgtgagtagtgtggaccctaataataagaatggttactactattatgcggatgttggaggggaacagttgtggatcgatgtgctacacgccacgctcgagcatggacttgcacctatgtcctggactgattacttgtacttgacgctgggagggactctctccaatgctggcatcagtggccagacattccgctatggtcctcaaatcaccactgtccgggaaatggacgtaatcaccggtaagaaaactttccattcaaccagttaacttacatgtttttagttttttagcttccaatatccaatagtttataacttgtaagcttcaattttatgttaatttataagctagttttaccctacttttgaaaattcaaggattttggtactacaataactcccttgtcaaactcgttcaattgttggcttagtatcaagtagactcttggatttttaggtgtactttaacaaccatgttaatttaattgatcagggttttaatattatggaaattggccattggacaacttggaatggaaggaaagcgggagatggaaagggaaaagaaattaattagaataattgttaatattagttgcgtgaaaaaaattaaatttgctgaattaaattatggttcatcacgactctatttgtggcaacaccaacgtgccgttttcagaacttcattgcaacagcggttatagtggcgtttattcaattcatattttaatgcatcagactgtgattgcgattgaaattttatgaaatcttgttttataaacttgttcttttgattaggaaacttgattctattttatatatatttaatgtaacgccgaattaatggttgataaacgagtctttgtctaaaattttggcgaatgttagcaagcgttttccacgtggtcccgtacgtgtttgaaaaattcttaatcatggaatcagttcacacgggcagtcatagactcatagactccaattcttgattaattgttttcttattaatattggtccatggtcttattttggtcaattctttttattaaaaataaacgggctgctgaattttaatttactcaagtgtttgttaatgaatatgtgtgcatgcatgcaattatatatatatatatatattactattatttatttgtgttttaatcaaattttggtttggttcaggaaagggagaatttgtgacttgctctcagcagacgaattcggagttgtttcacgcggttcttggaggcttaggacaatttggaattataacaagggcaagaattgctcttgcgccagctccgaagagggtacgtttaaaatcttcggaattgactaggacttgtcttgttgcttcttcctccaacatctctcatatagtaacgcaaatttctaaatatgttacattattaattcaaccaccaagctttgcggaagcatcaaatgtcgttgtcctgaaagcttcatgtcatcatttttcttggcacccatatacacacacatacgtttcacattgtgtcagtgcatattagtcatccatgaaagacacatgtacaaatgaaaacgagaggagttatattaaaatgtgtgttggaaaaatatatatcatattttcataagtcttaattttgaaattaatatacagtaaccctttgagaccttagcaattaagccaataaaaaggctcgtattaaccccaaccaacaactattagaaaatactaacaagtataggtgtatacataaatgattcatttgaattttagtaccttaattatttaactttatccttctatttgacgggactcgttgcataagccatacatacataatcatgcgttcattattgtttttcattatgagttaatgagttgattgtatgaactaatggtgaatttttgttggcaggttaaatgggtgagacttttgtacaatgacttttctgcttttaccaaagaccaggaacaactaatatctatcactggaaggaaacaaaatgtttcactggattatttggaaggattgctgctaatgcaccaaggacccataaataattggagatcttctttcttccctttagccgaccatgcccgaataatttcgctagtaactaaacacagcgtcctctattgcctagaagttgccaaatattatgatggccaaaatgaaaacaatgtggacaaggtaccatctccattcatgtgcatttgccttgatgatgtttcttctattttttcttttaatgttttgatctcaccttatataataaccctttatcacactcaatcttgttatatttttaagagtttaatgataatattatgattttgttgtgaaaaaagagagtttaattgttattatataatcacaaattatcattaatatgacttttaaaataattaataatataaaaattaataaatttatcgtatttaatgagttataattaaatgatcatataaaattattttatattattaacatatagtttttttttctatttttaatatttgttttactataagttgttatattttcaatcttttttctagtataagttttaataatcaatattgtaagtaatattctcatttttcatgttgtgtaggaactccaagttttactacaaggattgagctatatccctggattttactatgaaaaagatgtctcatattttgagttcttgaatagagtccgaagtggagagttgaagctacagtcacaaggactatgggatgttcctcacccgtggcttaatttgtttataccgaaatctcaaatcatggaatttgactcgggcgtgttcaagaatatcatccttaaacgaaacatcaccacaggacctgtcttggtttaccccatgaatagaaacaagtaattgagcttaactaactaatctcaacttatgttgttatcattaggaaaaatgttaattggtacgaaaactatatataccactattttcatttaaattcatgaaagtgaaatttctctttcctaaaacaaattctttctcttaaaatgaatttttgtttttctcaatctccatcaattacttatttccttttttgaatgtttgaaaagtcattcacaacattttcttcataaaagggttattcgtaccaatttaaatagaattgccgttattatcagatgtacaattcttctcttcactcacttcttttccattaaaattgtaaaaaaaaaataaaaaaatcaggtgggacaataggatgtcagcatcaatacccgatgaggatatcttctacacagttggatttttgcattcaagtgggtttgataattggaaggcctatgatgctcaaaataaagaaattctacaattttgtaacgttgctgggatcaaggttaagcaatatcttccccactatcgcacacaagaagattgggcaaaccattttggccctaaatggaggacttttgtagaaagaaaacaccagtttgatccaagaatgattctatcacctggacaaagaatctttaacaattaaaatagctttaaaaatatatattcccccccccccccccccccccaaaaaaaaaaaaattatataatatggtgggactacccaagttagctagctggctgatcacaagtgtgcacataggacccagaattcagatgatagcctttgtacttgtttttgttaagagggtggggttaaaagctgcatgactttggcatatatgtagatcaggttacacatactttagatacgttaggttgacaaaatcatgtgtgaaataagatgcacacagctagctgtgtacctttctttctctctgtccctcaatttgtctatcactaaaaagatttctatatagtttagaacctagtgaagagaaagaaaaaaccattatattgaggatttaattttatcacgttctaatcctatacattaatattcttaaatgtgcaatgagtgtgctcggtgccttaatgattctttatctttgttaattgttatattgtagggttttgtttttgccttcctaattttgtaacaggggcacccctagcaataattgagatcctaggttaactaaggaacagcattattgtgtctaaattgagattcctagctgtatgccataataataaatcatcgtaggttgctagatagatgtgatagcgccaaatgccttccaatactataatctccattgcaagatccttcgttgtgattgtgtagaaaagattacgctgctttacaagagaatactccaagaaagcaagtgattgctccttaatataaagaatcatgcaataaacaaatggtgtcgtaatccataaagtgtatttaatatttgatgaaagagtagtgtagacatcaaacaaaataaagtttgatgcaattcgaattatagatacttgattaatctctaaattatgttgagacaatcatatttgaatttgataagactattatgaacgataaaaaatattataaataataaaaaaatttcatcaaacatttaatacaattatataccttactcaaatttgaaaacctgtacatataggaaaaaaacctttactaaaagaggttaaactcaccatacggatttttatatgtcgaagggatctttaattgtccatcggaaaacatcctaattcataaaaaaggaaagaaagtttagacatgaataattacggaccaatgaatgcaacctacgtctctcaattttaaggagaatttaggaatattatagtatatcactgaaagtacacacaagtggcaatgatgaatattttaatttaaagttttaattggattcgaaattaatcccttcttttttccagaaaaaataataatcatcgagtaatcaagacaatttcccaagtagacaacaagaatacaaaagagaatacgtgacttcgtttcaccatagaaaagaaggaatgcaataacgatgataataattataaaatgaaattgacaaaatatctaaatgcctgtagatatttctacagcgaatgataagtgtttttccattaaaaataagtttcttttgttaagaatttctaacatttttagttccaaaatataggaatgaagccaataagtaagtaagaatttctaacgtctgaaag

SEQ ID NO: 167 - DNA, 7315 bp, Artificial Sequence
  Synthetic polynucleotide
ttaaatcggttcaaaattgttgaatcgatccaaaactagtaaatacagtaggttaattgatttcacttgaaatttaaaaaaaaaaaattaaaatgacgtcattttagtttttttttaaattattataacttatatgacatttttaagtgaagtttactttttattattattaatttatgcatactaggtttctgaaatattatattaaaatattatatatatatatatatatatatatatatatatatatatatatatatatatatatatatatatattattaaaatcaattccacttcgattgagctattaacttttgaaccaatatcttccccagttcaatgaccatccaagtctgaaaacattggttaccatcaacgttacccttccgtgaattggaaaagttaatgcaatataggttgatccaaggataagtcctatggtcccagaaagaaaatcttgagagatccttttgataattacccgagtttttactctctccttttaattcacgaaattggaaacttcaattgctaatataaaaagaattttgttagccaatatcatcagggtattgtcaaagaattacaagaaaaaaaaattataagataacataaaaaaataaaaaacaacataattttatatattttaataaaaaattcttttaatttttttttatcaatattctatagttactggcatttgacatgtaaaaatgtaaacatatgaattgataaaatttgaccaatgtttgaccctgagataggaatccaacggccccagttcaattgcaatcttttatttttactacgtgaaggcccaacaatggagaaccttgtggattttattgctgagaatctgtggttacgatgatgacacaccaacacaatcacagaaagcaagtaccgtttggaaggcctaacacttcattaattgcttcattaaatttattttactttctagctgctcaatttaattgctttacacaaatacttcatgacgtttcagaaggagggccaaatacaatctctacaatggttccatcgtatctttgaatttgacatttagcatccctccctttgcacaatgtacaatttgcattttgaatatttttttctcaccttcatatcgtgggactacttctataaccatcctggtgaaaataaataaagcgagggaattacgtaattaaacatatttaaatttctctctcctctgtttaattaatttatcaaaaacaaatatgtgtgcgagtatttaaaaatgtgtaaagtattattattttttaatttttcttttttccttctcatcaatgataaatatactttttaatataaaaatcaaacaataactataaaaaaaacatcttcacttcaattcaacattaaataaaaaataatccctgctttgttattttttacccaccaattatcatatttgttatttattatttttttatgttcttgctataaaggaaatcactatttgactcacacaaaactataaaggaatcaaataatcaattattatttaaaaactctattaaaataacaattacaacaaaatcccttatttttttcttccttatcattattaaaccttcccattctctctttctatctctacatgtttttctcaaattaaatattttctatatcctcctttatcatgcaaattaaagtcctcttccattctatatatagccgctacctcctccacctcctttccccactacaacacacaaacaccaacaaccaaatcaatccatccaccctagaaacaacaaagcactctctcttctctcattctattatcttctctcatccataacacgtttgatctccacagtgggcaaaacctcccaatggacgaaggccctgtcgctgcctccggaactcgcctccgtctccctcgacgacaccatcttctgcaagctccgtgacgacccagaggccctccagggaagggcctccagggactacgggaacctcgtccgcgaggttcccttggcagtcttccacccagcctcagcgagcgacatcgcgaggctgatcaagctgtcgtacaacggctctgtccccttcaagattgcggcgagggggcaagggcactcgacaaggggccaggcgatggcacgtgagggggtggtggtggacatggcggggttcagagagagagggaatggagtggggataagggttgtgagtagtgtggaccctaataataagaatggttactactattatgcggatgttggaggggaacagttgtggatcgatgtgctacacgccacgctcgagcatggacttgcacctatgtcctggactgattacttgtacttgacgctgggagggactctctccaatgctggcatcagtggccagacattccgctatggtcctcaaatcaccactgtccgggaaatggacgtaatcaccggtaagaaaactttccattcaaccagttaacttacatgtttttagttttttagcttccaatatccaatagtttataacttgtaagcttcaattttatgttaatttataagctagttttaccctacttttgaaaattcaaggattttggtactacaataactcccttgtcaaactcgttcaattgttggcttagtatcaagtagactcttggatttttaggtgtactttaacaaccatgttaatttaattgatcagggttttaatattatggaaattggccattggacaacttggaatggaaggaaagcgggagatggaaagggaaaagaaattaattagaataattgttaatattagttgcgtgaaaaaaattaaatttgctgaattaaattatggttcatcacgactctatttgtggcaacaccaacgtgccgttttcagaacttcattgcaacagcggttatagtggcgtttattcaattcatattttaatgcatcagactgtgattgcgattgaaattttatgaaatcttgttttataaacttgttcttttgattaggaaacttgattctattttatatatatttaatgtaacgccgaattaatggttgataaacgagtctttgtctaaaattttggcgaatgttagcaagcgttttccacgtggtcccgtacgtgtttgaaaaattcttaatcatggaatcagttcacacgggcagtcatagactcatagactccaattcttgattaattgttttcttattaatattggtccatggtcttattttggtcaattctttttattaaaaataaacgggctgctgaattttaatttactcaagtgtttgttaatgaatatgtgtgcatgcatgcaattatatatatatatatatattactattatttatttgtgttttaatcaaattttggtttggttcaggaaagggagaatttgtgacttgctctcagcagacgaattcggagttgtttcacgcggttcttggaggcttaggacaatttggaattataacaagggcaagaattgctcttgcgccagctccgaagagggtacgtttaaaatcttcggaattgactaggacttgtcttgttgcttcttcctccaacatctctcatatagtaacgcaaatttctaaatatgttacattattaattcaaccaccaagctttgcggaagcatcaaatgtcgttgtcctgaaagcttcatgtcatcatttttcttggcacccatatacacacacatacgtttcacattgtgtcagtgcatattagtcatccatgaaagacacatgtacaaatgaaaacgagaggagttatattaaaatgtgtgttggaaaaatatatatcatattttcataagtcttaattttgaaattaatatacagtaaccctttgagaccttagcaattaagccaataaaaaggctcgtattaaccccaaccaacaactattagaaaatactaacaagtataggtgtatacataaatgattcatttgaattttagtaccttaattatttaactttatccttctatttgacgggactcgttgcataagccatacatacataatcatgcgttcattattgtttttcattatgagttaatgagttgattgtatgaactaatggtgaatttttgttggcaggttaaatgggtgagacttttgtacaatgacttttctgcttttaccaaagaccaggaacaactaatatctatcactggaaggaaacaaaatgtttcactggattatttggaaggattgctgctaatgcaccaaggacccataaataattggagatcttctttcttccctttagccgaccatgcccgaataatttcgctagtaactaaacacagcgtcctctattgcctagaagttgccaaatattatgatggccaaaatgaaaacaatgtggacaaggtaccatctccattcatgtgcatttgccttgatgatgtttcttctattttttcttttaatgttttgatctcaccttatataataaccctttatcacactcaatcttgttatatttttaagagtttaatgataatattatgattttgttgtgaaaaaagagagtttaattgttattatataatcacaaattatcattaatatgacttttaaaataattaataatataaaaattaataaatttatcgtatttaatgagttataattaaatgatcatataaaattattttatattattaacatatagtttttttttctatttttaatatttgttttactataagttgttatattttcaatcttttttctagtataagttttaataatcaatattgtaagtaatattctcatttttcatgttgtgtaggaactccaagttttactacaaggattgagctatatccctggattttactatgaaaaagatgtctcatattttgagttcttgaatagagtccgaagtggagagttgaagctacagtcacaaggactatgggatgttcctcacccgtggcttaatttgtttataccgaaatctcaaatcatggaatttgactcgggcgtgttcaagaatatcatccttaaacgaaacatcaccacaggacctgtcttggtttaccccatgaatagaaacaagtaattgagcttaactaactaatctcaacttatgttgttatcattaggaaaaatgttaattggtacgaaaactatatataccactattttcatttaaattcatgaaagtgaaatttctctttcctaaaacaaattctttctcttaaaatgaatttttgtttttctcaatctccatcaattacttatttccttttttgaatgtttgaaaagtcattcacaacattttcttcataaaagggttattcgtaccaatttaaatagaattgccgttattatcagatgtacaattcttctcttcactcacttcttttccattaaaattgtaaaaaaaaaataaaaaaatcaggtgggacaataggatgtcagcatcaatacccgatgaggatatcttctacacagttggatttttgcattcaagtgggtttgataattggaaggcctatgatgctcaaaataaagaaattctacaattttgtaacgttgctgggatcaaggttaagcaatatcttccccactatcgcacacaagaagattgggcaaaccattttggccctaaatggaggacttttgtagaaagaaaacaccagtttgatccaagaatgattctatcacctggacaaagaatctttaacaattaaaatagctttaaaaatatatattcccccccccccccccccccccaaaaaaaaaaaaattatataatatggtgggactacccaagttagctagctggctgatcacaagtgtgcacataggacccagaattcagatgatagcctttgtacttgtttttgttaagagggtggggttaaaagctgcatgactttggcatatatgtagatcaggttacacatactttagatacgttaggttgacaaaatcatgtgtgaaataagatgcacacagctagctgtgtacctttctttctctctgtccctcaatttgtctatcactaaaaagatttctatatagtttagaacctagtgaagagaaagaaaaaaccattatattgaggatttaattttatcacgttctaatcctatacattaatattcttaaatgtgcaatgagtgtgctcggtgccttaatgattctttatctttgttaattgttatattgtagggttttgtttttgccttcctaattttgtaacaggggcacccctagcaataattgagatcctaggttaactaaggaacagcattattgtgtctaaattgagattcctagctgtatgccataataataaatcatcgtaggttgctagatagatgtgatagcgccaaatgccttccaatactataatctccattgcaagatccttcgttgtgattgtgtagaaaagattacgctgctttacaagagaatactccaagaaagcaagtgattgctccttaatataaagaatcatgcaataaacaaatggtgtcgtaatccataaagtgtatttaatatttgatgaaagagtagtgtagacatcaaacaaaataaagtttgatgcaattcgaattatagatacttgattaatctctaaattatgttgagacaatcatatttgaatttgataagactattatgaacgataaaaaatattataaataataaaaaaatttcatcaaacatttaatacaattatataccttactcaaatttgaaaacctgtacatataggaaaaaaacctttactaaaagaggttaaactcaccatacggatttttatatgtcgaagggatctttaattgtccatcggaaaacatcctaattcataaaaaaggaaagaaagtttagacatgaataattacggaccaatgaatgcaacctacgtctctcaattttaaggagaatttaggaatattatagtatatcactgaaagtacacacaagtggcaatgatgaatattttaatttaaagttttaattggattcgaaattaatcccttcttttttccagaaaaaataataatcatcgagtaatcaagacaatttcccaagtagacaacaagaatacaaaagagaatacgtgacttcgtttcaccatagaaaagaaggaatgcaataacgatgataataattataaaatgaaattgacaaaatatctaaatgcctgtagatatttctacagcgaatgataagtgtttttccattaaaaataagtttcttttgttaagaatttctaacatttttagttccaaaatataggaatgaagccaataagtaagtaagaatttctaacgtctgaaag

SEQ ID NO: 168 - DNA, 8176 bp, Artificial Sequence
  Synthetic polynucleotide
ctacttctagaatgacaactactcctatggcaatatcaattgttagcggtggttcccttaagttcgagactaagggcagtctccaaaaggaagaaaggaaataacaaacttaagcctgaatgttctacgttttatttagtgtctcttgatatttaaaggtctatcaaatatgtataataaccgcacttccactataataaccacactcccactacgataatcgctacaataaccaccacaataactacttctaggatgacaactacctctatataagtttccatgacagaacatcttcttcctaacaccttacctatcacaaatgcttctcctctcggtgtcagagagtactattgattccctaagttctgacggtgtctttttctaaccaaagatccacttttcgaaggtcccgagccaattcgatgagagctcggaggcatagaactcggtttagtcacttatgccatgcttcatttcgtcgcgcgtactttaccaatcaacacacgccatcgagattgatctgcaagtgcagattacgtaagcgagaaaggatttgcaatggaattcacaaatcgcacaatcagagaacaggataagtgtactgctaattatgagcgccagggagtgtagattcatgtcttaggttttaaaattagaacagaataaatatgaaaattgttttttactttctatattttatattttaatttttttttagtttttattattagtaatattgttaattataattaattataaaaattttaacaagtaatttattactaatttatcataagataatttataataaaaaaataattgataatttataattaatttataactaattatttttatattttgtttagtaaagactaaaaggtaattaaaatgtaaattatagagattaaaatatcatttttaaactataagaactaaaaaagaattaaaatacaaactataagacaaaaaagatcacttttaaactataggaactaaaaaaattacttttaaattatatggactaaaaaataccaatcgtaaaattataggaactaaataaataatataaccttaaattttttattttaagatcaattttttaaaaaattaatgttaatcatgatattttatttataaaatatcaaaactcattttgtaaaatggattttcatcaaaataaacgttcactttgctatggtaaatcttgttttgtagtattttggttgttctgacccaaatgacccaaatgcaggctagtggacaatgacattgattgttttgtatatgggttgggtgtcccttgtatcctattgatatattccttttgccttattaagaaaaattgcattagaaactactatatattaaatgctctaacaattaatgattaaattgacaccacatcctgtttgactctccacttttcttttattggtactctctattttagtctgctctttatatacatgttaacttaaagacagcaaatttaccaaagtaacttatcttctctcttgaaagaaaaatgccacagaggaatttagtactattttccacaactatggttgtgctattgctatctagcatagtgctcacacaagcacatagttcacaaaaccccagtggcaattttcaatccatcttctgttagtgacatcttggccttgatacatttctcaaactctcttcctaacccattccccatagcccctagagggaaagcacactctgttcatggacaagccatgacaaaagatggggtggtgttgaatatgactaacctcaatagcagttttcaaaatgggttaggggttttggtgtctgcttgtgatggaaaaggtccattgatttgttatgctgatgtaggtggtggccaaatgtggatcgatgtcttgcatgcatcccttgaacgtggactcacacctttgtctttgactgattatatgtatgccactgttgggggcacactatctaatgctggcatgggtggcatgtcctttcgatttggacctcagatctctaatgttcttgaattggatgttattacaggtatgactcactcaattttatcaattaattttcttccatactcatctacacgcttgttcgaagtgaaacatttaactgaattttttttatcttggatatcacaattgtgtaatttttcgtctagatttgtgattatgttaattcaatctgtatatcttaataattatattaaagtccctccctccttcaattatctgtcaaatatttaacgaaatatatttatgtgacatttgagaatgttgatgggtttatatgtgttattttagtcgattagattttacgtgtgaagttttagtgtctcccaaattcttattaacattgtgggaaaaaatgagaaaacaatcgcagaactggagtttgattccagattattattattatttagtaattttattattatctatatcataatagtatatttattaactcatttaatatcatatttattacatatatttagtgtaataatagtatatttattacattctttttacatacaaaaagtcagaaagacttaaaagcttctacaaaaagaaatacctgttatatcagctcttaaagaattacatatgaaatcctacgcatttattacacacacacaaatatatatatatatatatacttaaacagaaatatgaattgttattatatttataattagtatttatattaatagaacaatttatagtttatactatggaataaatttttaaatataaatttattatttatattgatatactcatttatagtttttactaagatataagtttataaatataaatttgcacctcttgtgattttgaactggttttttaataaataaaaaataaataaaaagattataaatataaattattattacattaacataataatttacatttattaatttaatactaaatatatatagtaaatgtatcattaaatgaatgtagtaaacatattattaattttcagaaaagttttaatactttttcaccctagaaatatacaaattttttttaattgatataatttttttttgtttatgattcttgtattaatatttaaaccttccgttggagattaacgggtaaaaaatacaaggtttaaacattatataagtaaagttttcttacaacgacaaaacaaaactaattaatatatttacagctaatgatgtttgtttaaaaagtgctaattatatttttttgttctagtcaatgttgtatagttacccaacatataatcagtgacggactttttagttgtggggaaatattcattatatatatatatatatatatgaatcggtgctgcatataatacaatatatacaattttacactgaaaactgtatattattaaaatttatcaggaattatgcttaaatatcttattgtatctatcttattaaagaaatctaattatatctataaaataaaggtttatttcgatcgttttgatatattgtaaatattattttttttgtttgtttttctcgtataaactttaatacatctatatatgtggcttttatatatagggaaaggagaccttgtgacttgctccaaggagcagaactcagaggcattttacgctgctcttggaggattaggtcaatttggggtgataacaagagcaagaatacctctaggacctgcacctactagggcaagtattagtttcccctttcatatagatttcgtaagggtgaaaataaaaataatattttataggactaaaattaaactaatttcatataaacctaaattaaaactcactcaaattatagatgtattaaaatcatatttaatctatatatatgccatttaattttaattgaaacatacatattatatatagatcattttttcctgtaaacttagtcttagacactatacaacttcaatactattaaaattgtaccaaaattaactatcttaaaactaaaaatgagaataagtcgggtaattgacataagtctatgagctcacttgtttaaagcttggtctcatctatctaataaaaaaagttaaacttaaactttttaaaaagtctatttatttatataatttagacttggacttgtgaaaaaacttattaaactgtatagaccggtctaattattcatttaaatatagtaaaacattaaaatatattatacttttattttaatatcttaatatgttaatatatttttatcataaataaaatgaatatttgaaataaatagatctttaaatatgtaataagctaaactatatcatatcttaatttttataacatgccatacctatatatttatataacgtctaacttgacctaacatattatcacccctacttaaaaattatttatctatttatttttaacaaagtttttttcatgtgggtgtttgcaggtaaaatggctccgcctgctatacaacaacttcactgcattttcaagagaccaagaacatttaatatcgttcagtgaaaggaatgacattgctacagcagattatgtagaaggcatgcttctattgaatcagccgccactggatcttctcttttatccagcttctgatcatcaaagggtaacttccttggtaactcaatatggcattatctacatcttggagcttgccaaatactattacaataactctcaggcacatgtcaatgaggtaacttgaaataaaagttgtttttagcatctagttagaaacttcttttatttttattcttatttttttatggacaacatatataatgaatttagtaaagaaatacagagatattctaattgttatatattcatcatacatcaaagatcaaattaatcctcctgattgaaaagaattttgttttcatgaatccaaaagaaacatgtctcaaactcactcaaattgtatggaacccatatattaattaatttatgtacaattcattgttttttactaaattgattatttttcttgtttcttaaataggaagttgcatatttgctgaaagggttaaactttgtacatacatttgtgttcgaaagagatgtgtcatacgaggagtttgtgaacagagtttatcctttggagcaaatgcttaggtcagaaggactttgggaagttcctcacccttggctgaacctctgggttccaagatctagaatctcagattttgatgaaggtgttttcaaggacattgttcttaagcaaaatattactggcggaagttttctagtctacccaacaaacagaagaaacaagtaaattgattagattatttatttttttgtgagtgtcaaattattatctagatcacccgtctcctttaatttacatatcctttctagtgtttccaatatataaaaaaatgacacctcactaaaaaaaataacaaataagagaatttattgttttttaaccacatttttttattgagagaaaacactccacaagaaaaataataataacaacaaaataatttatgtaatttttaaaagaaaaggtcacttaaatttttgcaactctaaaattagttattgaaaaaaaaaacctcaagtctcacatttactagaggaacctcctaagttttttctaaaatgaatatatttctaaaggatatgagacttaaagttttttcaatattaatttacaacattgtgctctgattcaaagtcaagcaatctcctagaataaaagagattgaaaatagcactaacactattggtggggtttgtggtttgtggtctgtggatttaaatttggcatgtggtatttaacagaacttcaacagaggtataaattataaaagatttttttttctgagaaaaagaaataaatggaggtatgttattaaaagagggagtatgaataacaactgtcctaataatactccattgggcctgacagtaggagttgggccataacaattagggacaaaaaataattttggttactaaatttagtcaataattccttttcttagtcacattagatgtttctgttccaatttatttgcttatgtaaatgacttaatttatacatatgtgaggattaaattgaatcaacattatgcttcacaggtgggatgataggatgacaccaattacacctgacgaagatgttttctacgttgtagattttttgcgtgttgctaaaacgtttgatgtggtggacaaactacaggttcaaaacaaacagatactgcggttttgtaatgatgctggtattaagatcacagagtatcttatcgggaacaaaactcatcaacaatgggtggaacactttggcccaaaatggaaactttttgcagatagaaaaactgaatttgatcccaaaaaaatattgtcacctggacatgggattttccagtaaataatgtgctaggtttcagtgaaatctctcattttggaaattcatgaaataaaaatgaaattctgtaccagaaaaaaaaaaaaaaacttgttgtgtaattctgtgccaaacatacattgaattggattgaagttattatgcaattttgtacgaaaaaaaacttatgtatttgattattttatgtttttttattaatgttgaatgttcaaatattctcatgactcacgaacaacggcagatctagaagaaaaaaatggtcgtaagatgtgttgatggtatttaaatgaatgcatgtctacttcaaaatttatttgatagactcatttcgtaaaaaaaaaaaatagaaataacctatttaacaatacttgtttggaaaataaatttaaaaataagaaatttggtcgtttttttatatagaaaatagcattgtttttatgatattttaatgcaattcacgattttatgttgttgggtttttaaataaataaaagttacataaaactttagttttaaattttctttgggactgtgaatggagttaaactctaaaaaagatctataattccaaagtcaggttaccatcaaatattgacatatagcaaaaaaaaaaactactcccttgggaaaattatataaaatattaccttgtcaagagacttgcatttatacaaatgatttatttagcaaaattgttgcatcatgatcaaataggacaaacgttgctaaatcaatgtcactaggcattggcacccttacaagttacaagatacctttaagaaatcgaaaactatttttttcaaaccctttgttttgtgaattaactctttatgagctattttatccctctcaatcggaatataaagagatttttccttacatgacactagtggtctgatcctaagtttgagcttgctcgatgataagcaatgattttaagttttgggtgagaatatataaaaacattggttggagcgttttttgtttttatttttaaagaaaataaaaaataagaatgaaaatatatttatttaaaatttagaaaatattttttctgaatatatttttgaaatagaccaaaaactgaaaataataaatcaacattttcagtcttgtttgaaaaggtgaaaacagcgtggtaccttagagtgctttcttcttaatacattttttttaatcttaaaaatttgaaaatgaaaataaaaaataaacgctcaaatcaagctccacctaaatttttctctattgcaaatgttgaaaaaaatggaaaagcaaaagatctcaaagtaaaataaatatattgtcttttgttacattttgtttcaatgattgtggggaataattgaggtaggataagtggtaggaaaaaatatcaagcaacggataatggtaattgttttatataaaggtttaaatatatttttagtcttttaatttaaaattattattattttttagtccttaaaaacaaatatgcaaattttagtaatctaaaattttaaaatctagttttagtcttgttttgttaactctataacagaggttgtctgtgtggaaaatgatgtgcaattttgtggcgatttctttagtgtgaaaattttgttttaaatttaaatcaaacaaaatgtctcgcaaggcaacaataacgttgttgctgctaacaatcttcgtgtggcaaaatcaacagtggagaaaacgactatcaacaatgttagagaagagttgacgaaggaaaatggggaaaataggacaaacccgaacaaaaaaaccacccttgacttg

SEQ ID NO: 169 - DNA, 7392 bp, Artificial Sequence
  Synthetic polynucleotide
ttaaatcggttcaaaattgttgaatcgatccaaaactagtaaatacagtaggttaattgatttcacttgaaatttaaaaaaaaaaaattaaaatgacgtcattttagtttttttttaaattattataacttatatgacatttttaagtgaagtttactttttattattattaatttatgcatactaggtttctgaaatattatattaaaatattatatatatatatatatatatatatatatatatatatatatatatatatatatatatatatatattattaaaatcaattccacttcgattgagctattaacttttgaaccaatatcttccccagttcaatgaccatccaagtctgaaaacattggttaccatcaacgttacccttccgtgaattggaaaagttaatgcaatataggttgatccaaggataagtcctatggtcccagaaagaaaatcttgagagatccttttgataattacccgagtttttactctctccttttaattcacgaaattggaaacttcaattgctaatataaaaagaattttgttagccaatatcatcagggtattgtcaaagaattacaagaaaaaaaaattataagataacataaaaaaataaaaaacaacataattttatatattttaataaaaaattcttttaatttttttttatcaatattctatagttactggcatttgacatgtaaaaatgtaaacatatgaattgataaaatttgaccaatgtttgaccctgagataggaatccaacggccccagttcaattgcaatcttttatttttactacgtgaaggcccaacaatggagaaccttgtggattttattgctgagaatctgtggttacgatgatgacacaccaacacaatcacagaaagcaagtaccgtttggaaggcctaacacttcattaattgcttcattaaatttattttactttctagctgctcaatttaattgctttacacaaatacttcatgacgtttcagaaggagggccaaatacaatctctacaatggttccatcgtatctttgaatttgacatttagcatccctccctttgcacaatgtacaatttgcattttgaatatttttttctcaccttcatatcgtgggactacttctataaccatcctggtgaaaataaataaagcgagggaattacgtaattaaacatatttaaatttctctctcctctgtttaattaatttatcaaaaacaaatatgtgtgcgagtatttaaaaatgtgtaaagtattattattttttaatttttcttttttccttctcatcaatgataaatatactttttaatataaaaatcaaacaataactataaaaaaaacatcttcacttcaattcaacattaaataaaaaataatccctgctttgttattttttacccaccaattatcatatttgttatttattatttttttatgttcttgctataaaggaaatcactatttgactcacacaaaactataaaggaatcaaataatcaattattatttaaaaactctattaaaataacaattacaacaaaatcccttatttttttcttccttatcattattaaaccttcccattctctctttctatctctacatgtttttctcaaattaaatattttctatatcctcctttatcatgcaaattaaagtcctcttccattctatatatagccgctacctcctccacctcctttccccactacaacacacaaacaccaacaaccaaatcaatccatccaccctagaaacaacaaagcactctctcttctctcattctattatcttctctcatcctcttattctctccaaaccaacaaaaaaaaaatggttgctgagaactacccttctcccacatacttcatcctctaaccataacacgtttgatctccacagtgggcaaaacctcccaatggacgaaggccctgtcgctgcctccggaactcgcctccgtctccctcgacgacaccatcttctgcaagctccgtgacgacccagaggccctccagggaagggcctccagggactacgggaacctcgtccgcgaggttcccttggcagtcttccacccagcctcagcgagcgacatcgcgaggctgatcaagctgtcgtacaacggctctgtccccttcaagattgcggcgagggggcaagggcactcgacaaggggccaggcgatggcacgtgagggggtggtggtggacatggcggggttcagagagagagggaatggagtggggataagggttgtgagtagtgtggaccctaataataagaatggttactactattatgcggatgttggaggggaacagttgtggatcgatgtgctacacgccacgctcgagcatggacttgcacctatgtcctggactgattacttgtacttgacgctgggagggactctctccaatgctggcatcagtggccagacattccgctatggtcctcaaatcaccactgtccgggaaatggacgtaatcaccggtaagaaaactttccattcaaccagttaacttacatgtttttagttttttagcttccaatatccaatagtttataacttgtaagcttcaattttatgttaatttataagctagttttaccctacttttgaaaattcaaggattttggtactacaataactcccttgtcaaactcgttcaattgttggcttagtatcaagtagactcttggatttttaggtgtactttaacaaccatgttaatttaattgatcagggttttaatattatggaaattggccattggacaacttggaatggaaggaaagcgggagatggaaagggaaaagaaattaattagaataattgttaatattagttgcgtgaaaaaaattaaatttgctgaattaaattatggttcatcacgactctatttgtggcaacaccaacgtgccgttttcagaacttcattgcaacagcggttatagtggcgtttattcaattcatattttaatgcatcagactgtgattgcgattgaaattttatgaaatcttgttttataaacttgttcttttgattaggaaacttgattctattttatatatatttaatgtaacgccgaattaatggttgataaacgagtctttgtctaaaattttggcgaatgttagcaagcgttttccacgtggtcccgtacgtgtttgaaaaattcttaatcatggaatcagttcacacgggcagtcatagactcatagactccaattcttgattaattgttttcttattaatattggtccatggtcttattttggtcaattctttttattaaaaataaacgggctgctgaattttaatttactcaagtgtttgttaatgaatatgtgtgcatgcatgcaattatatatatatatatatattactattatttatttgtgttttaatcaaattttggtttggttcaggaaagggagaatttgtgacttgctctcagcagacgaattcggagttgtttcacgcggttcttggaggcttaggacaatttggaattataacaagggcaagaattgctcttgcgccagctccgaagagggtacgtttaaaatcttcggaattgactaggacttgtcttgttgcttcttcctccaacatctctcatatagtaacgcaaatttctaaatatgttacattattaattcaaccaccaagctttgcggaagcatcaaatgtcgttgtcctgaaagcttcatgtcatcatttttcttggcacccatatacacacacatacgtttcacattgtgtcagtgcatattagtcatccatgaaagacacatgtacaaatgaaaacgagaggagttatattaaaatgtgtgttggaaaaatatatatcatattttcataagtcttaattttgaaattaatatacagtaaccctttgagaccttagcaattaagccaataaaaaggctcgtattaaccccaaccaacaactattagaaaatactaacaagtataggtgtatacataaatgattcatttgaattttagtaccttaattatttaactttatccttctatttgacgggactcgttgcataagccatacatacataatcatgcgttcattattgtttttcattatgagttaatgagttgattgtatgaactaatggtgaatttttgttggcaggttaaatgggtgagacttttgtacaatgacttttctgcttttaccaaagaccaggaacaactaatatctatcactggaaggaaacaaaatgtttcactggattatttggaaggattgctgctaatgcaccaaggacccataaataattggagatcttctttcttccctttagccgaccatgcccgaataatttcgctagtaactaaacacagcgtcctctattgcctagaagttgccaaatattatgatggccaaaatgaaaacaatgtggacaaggtaccatctccattcatgtgcatttgccttgatgatgtttcttctattttttcttttaatgttttgatctcaccttatataataaccctttatcacactcaatcttgttatatttttaagagtttaatgataatattatgattttgttgtgaaaaaagagagtttaattgttattatataatcacaaattatcattaatatgacttttaaaataattaataatataaaaattaataaatttatcgtatttaatgagttataattaaatgatcatataaaattattttatattattaacatatagtttttttttctatttttaatatttgttttactataagttgttatattttcaatcttttttctagtataagttttaataatcaatattgtaagtaatattctcatttttcatgttgtgtaggaactccaagttttactacaaggattgagctatatccctggattttactatgaaaaagatgtctcatattttgagttcttgaatagagtccgaagtggagagttgaagctacagtcacaaggactatgggatgttcctcacccgtggcttaatttgtttataccgaaatctcaaatcatggaatttgactcgggcgtgttcaagaatatcatccttaaacgaaacatcaccacaggacctgtcttggtttaccccatgaatagaaacaagtaattgagcttaactaactaatctcaacttatgttgttatcattaggaaaaatgttaattggtacgaaaactatatataccactattttcatttaaattcatgaaagtgaaatttctctttcctaaaacaaattctttctcttaaaatgaatttttgtttttctcaatctccatcaattacttatttccttttttgaatgtttgaaaagtcattcacaacattttcttcataaaagggttattcgtaccaatttaaatagaattgccgttattatcagatgtacaattcttctcttcactcacttcttttccattaaaattgtaaaaaaaaaataaaaaaatcaggtgggacaataggatgtcagcatcaatacccgatgaggatatcttctacacagttggatttttgcattcaagtgggtttgataattggaaggcctatgatgctcaaaataaagaaattctacaattttgtaacgttgctgggatcaaggttaagcaatatcttccccactatcgcacacaagaagattgggcaaaccattttggccctaaatggaggacttttgtagaaagaaaacaccagtttgatccaagaatgattctatcacctggacaaagaatctttaacaattaaaatagctttaaaaatatatattcccccccccccccccccccccaaaaaaaaaaaaattatataatatggtgggactacccaagttagctagctggctgatcacaagtgtgcacataggacccagaattcagatgatagcctttgtacttgtttttgttaagagggtggggttaaaagctgcatgactttggcatatatgtagatcaggttacacatactttagatacgttaggttgacaaaatcatgtgtgaaataagatgcacacagctagctgtgtacctttctttctctctgtccctcaatttgtctatcactaaaaagatttctatatagtttagaacctagtgaagagaaagaaaaaaccattatattgaggatttaattttatcacgttctaatcctatacattaatattcttaaatgtgcaatgagtgtgctcggtgccttaatgattctttatctttgttaattgttatattgtagggttttgtttttgccttcctaattttgtaacaggggcacccctagcaataattgagatcctaggttaactaaggaacagcattattgtgtctaaattgagattcctagctgtatgccataataataaatcatcgtaggttgctagatagatgtgatagcgccaaatgccttccaatactataatctccattgcaagatccttcgttgtgattgtgtagaaaagattacgctgctttacaagagaatactccaagaaagcaagtgattgctccttaatataaagaatcatgcaataaacaaatggtgtcgtaatccataaagtgtatttaatatttgatgaaagagtagtgtagacatcaaacaaaataaagtttgatgcaattcgaattatagatacttgattaatctctaaattatgttgagacaatcatatttgaatttgataagactattatgaacgataaaaaatattataaataataaaaaaatttcatcaaacatttaatacaattatataccttactcaaatttgaaaacctgtacatataggaaaaaaacctttactaaaagaggttaaactcaccatacggatttttatatgtcgaagggatctttaattgtccatcggaaaacatcctaattcataaaaaaggaaagaaagtttagacatgaataattacggaccaatgaatgcaacctacgtctctcaattttaaggagaatttaggaatattatagtatatcactgaaagtacacacaagtggcaatgatgaatattttaatttaaagttttaattggattcgaaattaatcccttcttttttccagaaaaaataataatcatcgagtaatcaagacaatttcccaagtagacaacaagaatacaaaagagaatacgtgacttcgtttcaccatagaaaagaaggaatgcaataacgatgataataattataaaatgaaattgacaaaatatctaaatgcctgtagatatttctacagcgaatgataagtgtttttccattaaaaataagtttcttttgttaagaatttctaacatttttagttccaaaatataggaatgaagccaataagtaagtaagaatttctaacgtctgaaag

SEQ ID NO: 170 - DNA, 3648 bp, Artificial Sequence
  Synthetic polynucleotide
cttctcatccaatctaatagcaggatacgcgatgtttacattccgacaatagtggactcagtaccaacaccataaaaaaaaataaacaactagttatgtgtccataggggcaaaagaaaaagaaatacgcactactgtggaaagaagaaaaaaagcaataaggacttatttctatatccggaaaaagcatatatccttaaattggttaatgaacaaaaacttgaaacatgtctttccttcatgtttttgttgtaacttataacataacatgtaattgtttgtggttaccactgtttggaaaaagttgaagatttgtgagatctctcattgatgttacttttcctcttcaacttggcttctgtgtcactgtacatgtgatgcctttggcgtctctcttccttccaagtaagcagtccacatacgcattctcctcgtatcgtatgtcataagtcatgactgatcaacaatgctacgttgaccaagccaccacccacaaactcctttaaattctggcccaaacccttaagttcctgcattctccaatccatcactttctccttttcctcgtgttcacaaaatcacgctgcttaattattccttcaactaccatcatatcataccttctcaacagaaaaataaaaataaaaatgagatacatccttggagaacacaacattctgttcctcaaaagcttcgcctccttagttgcatagccattcggcttaacttgtgtctttccagcatcccttcttcactgaaatcaattccccttgaagggcatttaaaatttgatcaagttagcctaagccatgcagcaagggactttggcaacaggtaccaatataatccaatggcagtgctgcaaccagaatcagtttctgatattgtagccaccataaggcatatctggctgatgggtcctggctcccacctcaccattgcagcgaggggccacggccactcgctgcagggtcaggctcaagcccatggaggacttgtgatcaacatggaatcactcaaggtcccagaaatgcaggtatatcgctaaatattaattgttaatcgttaattttttgttagctaggcaatcaaatccacaatcttttcctctcttccttcttcttatacaaccaaactaaccttataactccaatgcagatacatgttgatgagggaaacaagtctcctccatacgtggatgtctcaggtggcgagttgtggataaacatattgcatgagactctaagatacggcttggcgccaagatcgtggacagactacctgcatctcacagttggtggcactctctccaacgctggtgtcagtggtcagacatttaggcatggtccccagataagtaatgtacagcagctcgagattgttacaggtttgtgaaaaagagaatgaataataattgtttgtcttttctgaataataattcatttgatactggctgcatataagttttctaataaataatttttttcccctactttgatgagtaaaacatggtcaatgaatggatgcaggaacaggggaggtgttgaactgttccgcggagaataatggggatctctttcatggtgttctagggggcttggccaatttggcattataacccgggcaagaattgtcctagaaccagcacctaccatggtaatgcatcactcatcagtgactataccaaaacaagcttctttttttttggttttaatgtgtgctttgggtcatgactgaaaattttctatttattggaacaggtaaaatggattagagtgctgtactcagatttcacagcattcacaagagaccaagagaggttaatatctgcagaaaagacttttgactacattgaaggatttgtgataataaacagaactggtcttctaaataactggcgattatccttcaacccacgagacccggtccaagctagtcatttcaagtcggatggaagaactctcttctgccttgaaatggccaaatacttaaacgtggaagaaatcgatgcagcaaatcaggtgaggccagcaacactcaatctaatagatttttttgaaaataaagggataattaactccaaggttttaaaatatgagaccgtgggttgcaacatcaaagttttctaactctttgcgacccgaattgagactatgtcgatagcatttgtctatgatttgcccgtgatatcaacaaacacgaccaaaccacatgcgactgcgacctatatttaaaaccttgattaactcattagtgataatctttctttaggaaagaaaataaaagaggctaaatcaaccgtatctcacttttgtgtgtgcaggaagttgaggaacatttgtcccgtttaagctacatcccatcaactcttttttcaacagaagtcacatttgtagatttcttagacagggtgcacatatccgaggtcaagttgcgttcaaaaggcttgtgggatgttccacatccatggctcaatcttctaatacccaaaagccaaatactcaactttgcacaagtcgtcttcgggaacatcctatcagaaactagcaacggccccgtccttatctacccagtaaacaaatcaaagtaatgaatggttcagaaaaaaacatactattaactctagaaacaaatattttagccgtcaatattttttaattgacatgttttgttttgtttgcaggtgggacaacagaacttctgttgtgattccagaggaagatattttctacttagtggcatttcttacatctgcagttccatcttcaaatggaactgatggcctagaacacatactaagtcagaacaaaagaatattagaattctgtgaaagagcacaacttggagtgaagcagtatttgccccactacaacacacagcaagaatggagggcccattttggtcctcaatgggagacttttctgctgagaaagtccgtttatgatccattagcaatactcgcccctggccaacgtatatttcaaaaagcaataaccttctcatgaccacatttttattattaattattaaaaatctgaaaaaaaaaaagagaagaaaagtccttcatggcatgtgccaaaatgaaaaaaaaatgttatatgatccagacaggttttgacattgaccatacagaatgcaattgcaaaggaagaaggttcattgatagtagagaaaaagagggagaaaaagagattacaaaatgatgactggtgagatttgtatgccttgcaggttaatgaggaaagttgtcagtgtatgtaggtatgtaccattactgatggaaaaattgccttacgtgctgagtgtagcaccaaggcagcagggtccggctgagattagatcaacaaaacacattaatcattgtagggtttccaaagaacttataaatattatcagcgctagagccaatgtatagtactatcaattttgtaaacactcccttatttgttctctgtctcacatgtatccaaattcattaagattataattaaatacagatatttatgcatccaccacaaaaagatatcaatacgttcgcaacaaatacagataagatgatatataatgctgagtaacaaatactactattctagaaaattgcggaaaatgatataaaaatgggtatgcctaccctgaaggatgatgaat

SEQ ID NO: 171 - DNA, 5761 bp, Artificial Sequence; identical to SEQ ID NO: 131
  Synthetic polynucleotide

SEQ ID NO: 172 - DNA, 7360 bp, Artificial Sequence
  Synthetic polynucleotide
ttaaatcggttcaaaattgttgaatcgatccaaaactagtaaatacagtaggttaattgatttcacttgaaatttaaaaaaaaaaaattaaaatgacgtcattttagtttttttttaaattattataacttatatgacatttttaagtgaagtttactttttattattattaatttatgcatactaggtttctgaaatattatattaaaatattatatatatatatatatatatatatatatatatatatatatatatatatatatatatatatatattattaaaatcaattccacttcgattgagctattaacttttgaaccaatatcttccccagttcaatgaccatccaagtctgaaaacattggttaccatcaacgttacccttccgtgaattggaaaagttaatgcaatataggttgatccaaggataagtcctatggtcccagaaagaaaatcttgagagatccttttgataattacccgagtttttactctctccttttaattcacgaaattggaaacttcaattgctaatataaaaagaattttgttagccaatatcatcagggtattgtcaaagaattacaagaaaaaaaaattataagataacataaaaaaataaaaaacaacataattttatatattttaataaaaaattcttttaatttttttttatcaatattctatagttactggcatttgacatgtaaaaatgtaaacatatgaattgataaaatttgaccaatgtttgaccctgagataggaatccaacggccccagttcaattgcaatcttttatttttactacgtgaaggcccaacaatggagaaccttgtggattttattgctgagaatctgtggttacgatgatgacacaccaacacaatcacagaaagcaagtaccgtttggaaggcctaacacttcattaattgcttcattaaatttattttactttctagctgctcaatttaattgctttacacaaatacttcatgacgtttcagaaggagggccaaatacaatctctacaatggttccatcgtatctttgaatttgacatttagcatccctccctttgcacaatgtacaatttgcattttgaatatttttttctcaccttcatatcgtgggactacttctataaccatcctggtgaaaataaataaagcgagggaattacgtaattaaacatatttaaatttctctctcctctgtttaattaatttatcaaaaacaaatatgtgtgcgagtatttaaaaatgtgtaaagtattattattttttaatttttcttttttccttctcatcaatgataaatatactttttaatataaaaatcaaacaataactataaaaaaaacatcttcacttcaattcaacattaaataaaaaataatccctgctttgttattttttacccaccaattatcatatttgttatttattatttttttatgttcttgctataaaggaaatcactatttgactcacacaaaactataaaggaatcaaataatcaattattatttaaaaactctattaaaataacaattacaacaaaatcccttatttttttcttccttatcattattaaaccttcccattctctctttctatctctacatgtttttctcaaattaaatattttctatatcctcctttatcatgcaaattaaagtcctcttccattctatatatagccgctacctcctccacctcctttccccactacaacacacaaacaccaacaaccaaatcaatccatccaccctagaaacaacaaagcactctctcttctctcattctattatcttctctcatcctcttattctctccaaaccaacaaaaaaaaaatggttgctgagaactacccttctcccacatacttcatcctccaccataacacgtttgatctccacagtgggcaaaacctcccaatggacgaaggccctgtcgctgcctccggaactcgcctccgtctccctcgacgacaccatcttctgcaagctccgtccagggactacgggaacctcgtccgcgaggttcccttggcagtcttccacccagcctcagcgagcgacatcgcgaggctgatcaagctgtcgtacaacggctctgtccccttcaagattgcggcgagggggcaagggcactcgacaaggggccaggcgatggcacgtgagggggtggtggtggacatggcggggttcagagagagagggaatggagtggggataagggttgtgagtagtgtggaccctaataataagaatggttactactattatgcggatgttggaggggaacagttgtggatcgatgtgctacacgccacgctcgagcatggacttgcacctatgtcctggactgattacttgtacttgacgctgggagggactctctccaatgctggcatcagtggccagacattccgctatggtcctcaaatcaccactgtccgggaaatggacgtaatcaccggtaagaaaactttccattcaaccagttaacttacatgtttttagttttttagcttccaatatccaatagtttataacttgtaagcttcaattttatgttaatttataagctagttttaccctacttttgaaaattcaaggattttggtactacaataactcccttgtcaaactcgttcaattgttggcttagtatcaagtagactcttggatttttaggtgtactttaacaaccatgttaatttaattgatcagggttttaatattatggaaattggccattggacaacttggaatggaaggaaagcgggagatggaaagggaaaagaaattaattagaataattgttaatattagttgcgtgaaaaaaattaaatttgctgaattaaattatggttcatcacgactctatttgtggcaacaccaacgtgccgttttcagaacttcattgcaacagcggttatagtggcgtttattcaattcatattttaatgcatcagactgtgattgcgattgaaattttatgaaatcttgttttataaacttgttcttttgattaggaaacttgattctattttatatatatttaatgtaacgccgaattaatggttgataaacgagtctttgtctaaaattttggcgaatgttagcaagcgttttccacgtggtcccgtacgtgtttgaaaaattcttaatcatggaatcagttcacacgggcagtcatagactcatagactccaattcttgattaattgttttcttattaatattggtccatggtcttattttggtcaattctttttattaaaaataaacgggctgctgaattttaatttactcaagtgtttgttaatgaatatgtgtgcatgcatgcaattatatatatatatatatattactattatttatttgtgttttaatcaaattttggtttggttcaggaaagggagaatttgtgacttgctctcagcagacgaattcggagttgtttcacgcggttcttggaggcttaggacaatttggaattataacaagggcaagaattgctcttgcgccagctccgaagagggtacgtttaaaatcttcggaattgactaggacttgtcttgttgcttcttcctccaacatctctcatatagtaacgcaaatttctaaatatgttacattattaattcaaccaccaagctttgcggaagcatcaaatgtcgttgtcctgaaagcttcatgtcatcatttttcttggcacccatatacacacacatacgtttcacattgtgtcagtgcatattagtcatccatgaaagacacatgtacaaatgaaaacgagaggagttatattaaaatgtgtgttggaaaaatatatatcatattttcataagtcttaattttgaaattaatatacagtaaccctttgagaccttagcaattaagccaataaaaaggctcgtattaaccccaaccaacaactattagaaaatactaacaagtataggtgtatacataaatgattcatttgaattttagtaccttaattatttaactttatccttctatttgacgggactcgttgcataagccatacatacataatcatgcgttcattattgtttttcattatgagttaatgagttgattgtatgaactaatggtgaatttttgttggcaggttaaatgggtgagacttttgtacaatgacttttctgcttttaccaaagaccaggaacaactaatatctatcactggaaggaaacaaaatgtttcactggattatttggaaggattgctgctaatgcaccaaggacccataaataattggagatcttctttcttccctttagccgaccatgcccgaataatttcgctagtaactaaacacagcgtcctctattgcctagaagttgccaaatattatgatggccaaaatgaaaacaatgtggacaaggtaccatctccattcatgtgcatttgccttgatgatgtttcttctattttttcttttaatgttttgatctcaccttatataataaccctttatcacactcaatcttgttatatttttaagagtttaatgataatattatgattttgttgtgaaaaaagagagtttaattgttattatataatcacaaattatcattaatatgacttttaaaataattaataatataaaaattaataaatttatcgtatttaatgagttataattaaatgatcatataaaattattttatattattaacatatagtttttttttctatttttaatatttgttttactataagttgttatattttcaatcttttttctagtataagttttaataatcaatattgtaagtaatattctcatttttcatgttgtgtaggaactccaagttttactacaaggattgagctatatccctggattttactatgaaaaagatgtctcatattttgagttcttgaatagagtccgaagtggagagttgaagctacagtcacaaggactatgggatgttcctcacccgtggcttaatttgtttataccgaaatctcaaatcatggaatttgactcgggcgtgttcaagaatatcatccttaaacgaaacatcaccacaggacctgtcttggtttaccccatgaatagaaacaagtaattgagcttaactaactaatctcaacttatgttgttatcattaggaaaaatgttaattggtacgaaaactatatataccactattttcatttaaattcatgaaagtgaaatttctctttcctaaaacaaattctttctcttaaaatgaatttttgtttttctcaatctccatcaattacttatttccttttttgaatgtttgaaaagtcattcacaacattttcttcataaaagggttattcgtaccaatttaaatagaattgccgttattatcagatgtacaattcttctcttcactcacttcttttccattaaaattgtaaaaaaaaaataaaaaaatcaggtgggacaataggatgtcagcatcaatacccgatgaggatatcttctacacagttggatttttgcattcaagtgggtttgataattggaaggcctatgatgctcaaaataaagaaattctacaattttgtaacgttgctgggatcaaggttaagcaatatcttccccactatcgcacacaagaagattgggcaaaccattttggccctaaatggaggacttttgtagaaagaaaacaccagtttgatccaagaatgattctatcacctggacaaagaatctttaacaattaaaatagctttaaaaatatatattcccccccccccccccccccccaaaaaaaaaaaaattatataatatggtgggactacccaagttagctagctggctgatcacaagtgtgcacataggacccagaattcagatgatagcctttgtacttgtttttgttaagagggtggggttaaaagctgcatgactttggcatatatgtagatcaggttacacatactttagatacgttaggttgacaaaatcatgtgtgaaataagatgcacacagctagctgtgtacctttctttctctctgtccctcaatttgtctatcactaaaaagatttctatatagtttagaacctagtgaagagaaagaaaaaaccattatattgaggatttaattttatcacgttctaatcctatacattaatattcttaaatgtgcaatgagtgtgctcggtgccttaatgattctttatctttgttaattgttatattgtagggttttgtttttgccttcctaattttgtaacaggggcacccctagcaataattgagatcctaggttaactaaggaacagcattattgtgtctaaattgagattcctagctgtatgccataataataaatcatcgtaggttgctagatagatgtgatagcgccaaatgccttccaatactataatctccattgcaagatccttcgttgtgattgtgtagaaaagattacgctgctttacaagagaatactccaagaaagcaagtgattgctccttaatataaagaatcatgcaataaacaaatggtgtcgtaatccataaagtgtatttaatatttgatgaaagagtagtgtagacatcaaacaaaataaagtttgatgcaattcgaattatagatacttgattaatctctaaattatgttgagacaatcatatttgaatttgataagactattatgaacgataaaaaatattataaataataaaaaaatttcatcaaacatttaatacaattatataccttactcaaatttgaaaacctgtacatataggaaaaaaacctttactaaaagaggttaaactcaccatacggatttttatatgtcgaagggatctttaattgtccatcggaaaacatcctaattcataaaaaaggaaagaaagtttagacatgaataattacggaccaatgaatgcaacctacgtctctcaattttaaggagaatttaggaatattatagtatatcactgaaagtacacacaagtggcaatgatgaatattttaatttaaagttttaattggattcgaaattaatcccttcttttttccagaaaaaataataatcatcgagtaatcaagacaatttcccaagtagacaacaagaatacaaaagagaatacgtgacttcgtttcaccatagaaaagaaggaatgcaataacgatgataataattataaaatgaaattgacaaaatatctaaatgcctgtagatatttctacagcgaatgataagtgtttttccattaaaaataagtttcttttgttaagaatttctaacatttttagttccaaaatataggaatgaagccaataagtaagtaagaatttctaacgtctgaaag

SEQ ID NO: 173 - DNA, 8273 bp, Artificial Sequence
  Synthetic polynucleotide
ctacttctagaatgacaactactcctatggcaatatcaattgttagcggtggttcccttaagttcgagactaagggcagtctccaaaaggaagaaaggaaataacaaacttaagcctgaatgttctacgttttatttagtgtctcttgatatttaaaggtctatcaaatatgtataataaccgcacttccactataataaccacactcccactacgataatcgctacaataaccaccacaataactacttctaggatgacaactacctctatataagtttccatgacagaacatcttcttcctaacaccttacctatcacaaatgcttctcctctcggtgtcagagagtactattgattccctaagttctgacggtgtctttttctaaccaaagatccacttttcgaaggtcccgagccaattcgatgagagctcggaggcatagaactcggtttagtcacttatgccatgcttcatttcgtcgcgcgtactttaccaatcaacacacgccatcgagattgatctgcaagtgcagattacgtaagcgagaaaggatttgcaatggaattcacaaatcgcacaatcagagaacaggataagtgtactgctaattatgagcgccagggagtgtagattcatgtcttaggttttaaaattagaacagaataaatatgaaaattgttttttactttctatattttatattttaatttttttttagtttttattattagtaatattgttaattataattaattataaaaattttaacaagtaatttattactaatttatcataagataatttataataaaaaaataattgataatttataattaatttataactaattatttttatattttgtttagtaaagactaaaaggtaattaaaatgtaaattatagagattaaaatatcatttttaaactataagaactaaaaaagaattaaaatacaaactataagacaaaaaagatcacttttaaactataggaactaaaaaaattacttttaaattatatggactaaaaaataccaatcgtaaaattataggaactaaataaataatataaccttaaattttttattttaagatcaattttttaaaaaattaatgttaatcatgatattttatttataaaatatcaaaactcattttgtaaaatggattttcatcaaaataaacgttcactttgctatggtaaatcttgttttgtagtattttggttgttctgacccaaatgacccaaatgcaggctagtggacaatgacattgattgttttgtatatgggttgggtgtcccttgtatcctattgatatattccttttgccttattaagaaaaattgcattagaaactactatatattaaatgctctaacaattaatgattaaattgacaccacatcctgtttgactctccacttttcttttattggtactctctattttagtctgctctttatatacatgttaacttaaagacagcaaatttaccaaagtaacttatcttctctcttgaaagaaaaatgccacagaggaatttagtactattttccacaactatggttgtgcgctatctagcatagtgctcacacaagcacaaccacgatcatggtcagcattccaagcatccaaagaactagccacaaagcttagtcgtaaccctcaaacctttccacatgcctcaaccgattatgggcacatagttcacaaaaccccagtggcaattttcaatccatcttctgttagtgacatcttggccttgatacatttctcaaactctcttcctaacccattccccatagcccctagagggaaagcacactctgttcatggacaagccatgacaaaagatggggtggtgttgaatatgactaacctcaatagcagttttcaaaatgggttaggggttttggtgtctgcttgtgatggaaaaggtccattgatttgttatgctgatgtaggtggtggccaaatgtggatcgatgtcttgcatgcatcccttgaacgtggactcacacctttgtctttgactgattatatgtatgccactgttgggggcacactatctaatgctggcatgggtggcatgtcctttcgatttggacctcagatctctaatgttcttgaattggatgttattacaggtatgactcactcaattttatcaattaattttcttccatactcatctacacgcttgttcgaagtgaaacatttaactgaattttttttatcttggatatcacaattgtgtaatttttcgtctagatttgtgattatgttaattcaatctgtatatcttaataattatattaaagtccctccctccttcaattatctgtcaaatatttaacgaaatatatttatgtgacatttgagaatgttgatgggtttatatgtgttattttagtcgattagattttacgtgtgaagttttagtgtctcccaaattcttattaacattgtgggaaaaaatgagaaaacaatcgcagaactggagtttgattccagattattattattatttagtaattttattattatctatatcataatagtatatttattaactcatttaatatcatatttattacatatatttagtgtaataatagtatatttattacattctttttacatacaaaaagtcagaaagacttaaaagcttctacaaaaagaaatacctgttatatcagctcttaaagaattacatatgaaatcctacgcatttattacacacacacaaatatatatatatatatatacttaaacagaaatatgaattgttattatatttataattagtatttatattaatagaacaatttatagtttatactatggaataaatttttaaatataaatttattatttatattgatatactcatttatagtttttactaagatataagtttataaatataaatttgcacctcttgtgattttgaactggttttttaataaataaaaaataaataaaaagattataaatataaattattattacattaacataataatttacatttattaatttaatactaaatatatatagtaaatgtatcattaaatgaatgtagtaaacatattattaattttcagaaaagttttaatactttttcaccctagaaatatacaaattttttttaattgatataatttttttttgtttatgattcttgtattaatatttaaaccttccgttggagattaacgggtaaaaaatacaaggtttaaacattatataagtaaagttttcttacaacgacaaaacaaaactaattaatatatttacagctaatgatgtttgtttaaaaagtgctaattatatttttttgttctagtcaatgttgtatagttacccaacatataatcagtgacggactttttagttgtggggaaatattcattatatatatatatatatatatgaatcggtgctgcatataatacaatatatacaattttacactgaaaactgtatattattaaaatttatcaggaattatgcttaaatatcttattgtatctatcttattaaagaaatctaattatatctataaaataaaggtttatttcgatcgttttgatatattgtaaatattattttttttgtttgtttttctcgtataaactttaatacatctatatatgtggcttttatatatagggaaaggagaccttgtgacttgctccaaggagcagaactcagaggcattttacgctgctcttggaggattaggtcaatttggggtgataacaagagcaagaatacctctaggacctgcacctactagggcaagtattagtttcccctttcatatagatttcgtaagggtgaaaataaaaataatattttataggactaaaattaaactaatttcatataaacctaaattaaaactcactcaaattatagatgtattaaaatcatatttaatctatatatatgccatttaattttaattgaaacatacatattatatatagatcattttttcctgtaaacttagtcttagacactatacaacttcaatactattaaaattgtaccaaaattaactatcttaaaactaaaaatgagaataagtcgggtaattgacataagtctatgagctcacttgtttaaagcttggtctcatctatctaataaaaaaagttaaacttaaactttttaaaaagtctatttatttatataatttagacttggacttgtgaaaaaacttattaaactgtatagaccggtctaattattcatttaaatatagtaaaacattaaaatatattatacttttattttaatatcttaatatgttaatatatttttatcataaataaaatgaatatttgaaataaatagatctttaaatatgtaataagctaaactatatcatatcttaatttttataacatgccatacctatatatttatataacgtctaacttgacctaacatattatcacccctacttaaaaattatttatctatttatttttaacaaagtttttttcatgtgggtgtttgcaggtaaaatggctccgcctgctatacaacaacttcactgcattttcaagagaccaagaacatttaatatcgttcagtgaaaggaatgacattgctacagcagattatgtagaaggcatgcttctattgaatcagccgccactggatcttctcttttatccagcttctgatcatcaaagggtaacttccttggtaactcaatatggcattatctacatcttggagcttgccaaatactattacaataactctcaggcacatgtcaatgaggtaacttgaaataaaagttgtttttagcatctagttagaaacttcttttatttttattcttatttttttatggacaacatatataatgaatttagtaaagaaatacagagatattctaattgttatatattcatcatacatcaaagatcaaattaatcctcctgattgaaaagaattttgttttcatgaatccaaaagaaacatgtctcaaactcactcaaattgtatggaacccatatattaattaatttatgtacaattcattgttttttactaaattgattatttttcttgtttcttaaataggaagttgcatatttgctgaaagggttaaactttgtacatacatttgtgttcgaaagagatgtgtcatacgaggagtttgtgaacagagtttatcctttggagcaaatgcttaggtcagaaggactttgggaagttcctcacccttggctgaacctctgggttccaagatctagaatctcagattttgatgaaggtgttttcaaggacattgttcttaagcaaaatattactggcggaagttttctagtctacccaacaaacagaagaaacaagtaaattgattagattatttatttttttgtgagtgtcaaattattatctagatcacccgtctcctttaatttacatatcctttctagtgtttccaatatataaaaaaatgacacctcactaaaaaaaataacaaataagagaatttattgttttttaaccacatttttttattgagagaaaacactccacaagaaaaataataataacaacaaaataatttatgtaatttttaaaagaaaaggtcacttaaatttttgcaactctaaaattagttattgaaaaaaaaaacctcaagtctcacatttactagaggaacctcctaagttttttctaaaatgaatatatttctaaaggatatgagacttaaagttttttcaatattaatttacaacattgtgctctgattcaaagtcaagcaatctcctagaataaaagagattgaaaatagcactaacactattggtggggtttgtggtttgtggtctgtggatttaaatttggcatgtggtatttaacagaacttcaacagaggtataaattataaaagatttttttttctgagaaaaagaaataaatggaggtatgttattaaaagagggagtatgaataacaactgtcctaataatactccattgggcctgacagtaggagttgggccataacaattagggacaaaaaataattttggttactaaatttagtcaataattccttttcttagtcacattagatgtttctgttccaatttatttgcttatgtaaatgacttaatttatacatatgtgaggattaaattgaatcaacattatgcttcacaggtgggatgataggatgacaccaattacacctgacgaagatgttttctacgttgtagattttttgcgtgttgctaaaacgtttgatgtggtggacaaactacaggttcaaaacaaacagatactgcggttttgtaatgatgctggtattaagatcacagagtatcttatcgggaacaaaactcatcaacaatgggtggaacactttggcccaaaatggaaactttttgcagatagaaaaactgaatttgatcccaaaaaaatattgtcacctggacatgggattttccagtaaataatgtgctaggtttcagtgaaatctctcattttggaaattcatgaaataaaaatgaaattctgtaccagaaaaaaaaaaaaaaacttgttgtgtaattctgtgccaaacatacattgaattggattgaagttattatgcaattttgtacgaaaaaaaacttatgtatttgattattttatgtttttttattaatgttgaatgttcaaatattctcatgactcacgaacaacggcagatctagaagaaaaaaatggtcgtaagatgtgttgatggtatttaaatgaatgcatgtctacttcaaaatttatttgatagactcatttcgtaaaaaaaaaaaatagaaataacctatttaacaatacttgtttggaaaataaatttaaaaataagaaatttggtcgtttttttatatagaaaatagcattgtttttatgatattttaatgcaattcacgattttatgttgttgggtttttaaataaataaaagttacataaaactttagttttaaattttctttgggactgtgaatggagttaaactctaaaaaagatctataattccaaagtcaggttaccatcaaatattgacatatagcaaaaaaaaaaactactcccttgggaaaattatataaaatattaccttgtcaagagacttgcatttatacaaatgatttatttagcaaaattgttgcatcatgatcaaataggacaaacgttgctaaatcaatgtcactaggcattggcacccttacaagttacaagatacctttaagaaatcgaaaactatttttttcaaaccctttgttttgtgaattaactctttatgagctattttatccctctcaatcggaatataaagagatttttccttacatgacactagtggtctgatcctaagtttgagcttgctcgatgataagcaatgattttaagttttgggtgagaatatataaaaacattggttggagcgttttttgtttttatttttaaagaaaataaaaaataagaatgaaaatatatttatttaaaatttagaaaatattttttctgaatatatttttgaaatagaccaaaaactgaaaataataaatcaacattttcagtcttgtttgaaaaggtgaaaacagcgtggtaccttagagtgctttcttcttaatacattttttttaatcttaaaaatttgaaaatgaaaataaaaaataaacgctcaaatcaagctccacctaaatttttctctattgcaaatgttgaaaaaaatggaaaagcaaaagatctcaaagtaaaataaatatattgtcttttgttacattttgtttcaatgattgtggggaataattgaggtaggataagtggtaggaaaaaatatcaagcaacggataatggtaattgttttatataaaggtttaaatatatttttagtcttttaatttaaaattattattattttttagtccttaaaaacaaatatgcaaattttagtaatctaaaattttaaaatctagttttagtcttgttttgttaactctataacagaggttgtctgtgtggaaaatgatgtgcaattttgtggcgatttctttagtgtgaaaattttgttttaaatttaaatcaaacaaaatgtctcgcaaggcaacaataacgttgttgctgctaacaatcttcgtgtggcaaaatcaacagtggagaaaacgactatcaacaatgttagagaagagttgacgaaggaaaatggggaaaataggacaaacccgaacaaaaaaaccacccttgacttg

SEQ ID NO: 174 - DNA, 5761 bp, Artificial Sequence
  Synthetic polynucleotide
ataaatggtagaaatctgtgggttcaaatgttcaattgctggggatcttcgtgatcatgatgattcatacacaatctctagaaacacgtacgcaaatattaattaatcaatttcctttttatagtctcctcacaattcacatgaaacttcatactctattatccgattccatttccatcgtatctttgaatttgacatttgtttgcccaacatgtaattaactttcccttctcatcttaaagatgtaacatgatatatattataacttgtaattaacccaatatttttaactctctatttttacactcatctgacatgtatttttatttttcatttttttttcttatcacatcacctcttacgtgtacaatttttctctttttcttatttctgtcttccataatagtaattaatattcatcggtccgatatgtatacagcccaaaaaagtgtgtaaaatcatttttgtatttctaaccctctctttctcatgcaagctagcttcttctttctatttatagcccttctcccttcacccaccaacacaccacaactccaaactttttcctcttgttctcttcttcttcaacacaactagtcataatccagctcatctctctctccctctctctttgttctctctttctctttctccaaaatggctctaaactacccttttttaacctacttcatactactgctagtaaccatatgatattcactgtgggaaaaactgagcaatggaaagctccgattctaccagagcttgacattgataacatatcccacaaactccatgatgaccctgaaaccattcaaatggcttcaagggactatggccatttaacgcatgaattcccattagctgtgtttcgtccatcttctatagatgacatagtcaccttgataaaatcttcgtacaatagctttgccccttttgacatagctgcgaggggccaaggccactccactcatggacaagccatggctcgtgatgggattgtggtggacatggccagcctaagaaaacaaagaaatggggttgcgattagtgtctctaaggaccctttgatgggtcactatgctgatgttggaggggaacaactctggattgatgtgctacatgccacacttgaatatggacttgcaccagtttcttggactgattatttgtacttgaccgtgggagggacactttctaatgctggaatcagtggccagagcttccgttatggacctcaaatcagcaacgttcatgaaatggatgtcatcactggtatggagttagttgttttttttaatcaataaatgttaatattattagcttgttagttttttttgaaaaaattgaattaactttcgtttcctcttttctttctttttttaaccacacaattaatctaataactactggtattaagttagtttattttccatttttcatatataagttaggatttctaattaaaattgacatttcgtaccaccactacaaaaaaataatgtatcagtggcacaaaaaaatatattggcatcacttgtttttttagtcattaatattttgtagcatcacaaaaaatatggtgacaagttttctaaaaattacaaattaactgattcgtcagtgatgttaatgattttttagtgcgtcttggcaactaatgttttcatcttatataaaattagaaacaatagcggcaacagcacctgacattgtgtttgtgttttgcgtgtttctatcgcctaatttttgttgagaacgtgttcgtgaaacttggaaaaagagaaaattgaaattttcttgagatatctaccacttaagaaaaacaaatggctgtttccgttttgtctcttatgacatgacatggtacgtcatagatgaagttctgctaaatatatttgatatgatttcttgaacacgttttatatattcccacttcccagttagtgtggttgttgaatctaattaaaacaggaatagtctttgtctacaatatgggtgagcgatgcaaactttccaagggtttagaagttagaactatataggtccacggtcataattttatattcttgattaactttatgttggttaagtcgttcatatttggtcaattcattcatatgagaaaatactgaaatacaaacatggaaaaatgttaattactcttataattggcgcatgcatgcatctaaattatatgattttaataaatagtttttgtcatctacttgatttcaggaaaaggagagttcgtaacatgctcttcacagaagaacttggagttattccacgcggttcttggaggcttgggacaatttggagttatagcaagggcgagaattgctcttgagccagcacccaaaagggtacgtttatagagaattgactagaattttgtcttgtagcttttcctccaccaattcatatagtgacacctaatcgaattgtcatttttttttacggtgaattgtcattttgtaaatctaccaagtggtagttggcacccatatatgtatgaactatagtaccatacatttcattttatgttggtgtgttagtcatccatgatgaacacatacacaaatgaaaataggacgagttatacgtacgtaagggtttgaatcactgaatgtggatttttgaagttgaaagcatattaatcttggtttgaaaaagaaaaaaaaaatcggaagtccctcttgaagttatcatgactcttatattaagccaatagaattagaaaaactataattatgaatgatcatgttaattctttcagtgacttaaaatcttatctacaaaaagtacccttttgaaaaagaccttcacttaagtccatgcatacagtactaatcttacatacttgagagttgagacttgaagcatgaggagatttgaagtctggagaaacaagccaccacatattaattactaccgtattcttatctttatttatccttccaattttgatgggactggttgcacatacattcatacatactaacatacataaatacgtctctctctcatgtatttcattttattatattctatttcgttagtaagtttactagtataagacattattaatggtgaatttttgttggcatgcaggttaagtgggtcagactactttatagtgacttttctgcttttaccaaagaccaggaacgattaatctcaatcaatggaaggaaacaaaagaacgcattggattttctggaagggatgctgctaatgaaccaaggccccataaataattggagatcctctttcttccctctatctgaccatcccagaatagcttctttaataactgaacatagcatcctctactgtcttgaagtggctaaatattatgacgaacaaaccgagttaaatgtggacaaggtaacctcgtctagtcatatctattatatatagttagatcttgtcacatttctttgtttaaaaaataaaataaaaggcacaatcccaaaaagtcaaaagcaaatgcctagatattgtgtgttttcttggatattaattattacaccttaataacccataataatttttttatttttctttgtctctgtaggaaattgaagttttgctccaaggactagcctatatccctggatttaattatgagaaaaatgtctcgtacgttgagttcttgaatagggtccgaagtggagagttgaaacttcagtcacaaggactgtgggaagttcctcacccgtggcttaatttgtttataccaaaatctcaaatcttggattttaattcaggagtattcaaagatatagttcttaaaagaaacatctcctctggaccagtcttggtttatcccatgaatagaaacaagtaagccttgaatgcatgaatcacaatctagtgtcattataattcaggagtgtgtgatgcaatcttttaattttctgaccattcaactcaatatcaattttatttcttttttcaattaaaatgcaaaagagaataataattaataatatgaaatttaattccaggtgggacgataggatgtcagcatctataccagacgaggatgttttctacacagttgggtttttgcactcaagtgggtttgatacttggaaggcatatgatgctcaaaacagagaaattttggagttctgtagagatgctggcatcatggtcaagcaatatcttcccaaccacagcacacaagaagattggacaaaccattttggtgctaaatggatgaaattcttagaaagaaaacatcagtttgatccaagaatgattctatcacctgggcaaaaaatcttccacaaaaaattacagccagtgttttaaatattttccctaataaaaaaagtaaaaatgttttgtggtgggactacctcaattagatggctagctagggacaggtgtacatacagtgtgaccaagaccaagatggcttttgtatgctaaagtttgcattgctagctagagaaattaataaggtggggcattaaaggctgcatgagtacttttggcacctattatgctacatattaccttagatacgttaggttgacaaagtcgtactggtaggtacaagaagcacagttgtctctcacactgtctgtcacccaacttgctatatagtgtgtggagaaattcggatcatattgaagatgctgtgagttatagtcctccaatattaaatgtttaacgattctgtctttctcttatataattttgttttgcattatattactttcgcactggtgcaaacatatatatcaatgattataattaatttatacaatgacgagtataattgtacccaagttgcatgccataatatttgtcaaaaacaaaaagttgtatgccataatcaatccaggttgctagataataagatagatatgaatatgataacataaaatgctattaaagcaacaaataaacaataacacatagtccttatagggttcataattgatcgatgaacctagctagacgttgattttaggttaatttccagcgaggataaaatttattatataaagaaataactaaccaacacaaaataataaaaaattaaaaaaaaacgaagaaacttattttagagatataatttgttttagtatttgattgtaatttgagagattagctaggctctcaccaagtgagatctagagtatattcttaagaaaatatttataataaagaacccttaaacattttgcaaaacaaagggtggaattaatattaacaacaataattataatatcttgaaaattttatgaaaataatatatatatatatatatatatagagagagagagagagagagagagaaaattctcacaaacaatttttatctgttatttcaaattggtgtatgactccttagtccttagttcatttgtttgcacccagtcctgtcttaggtagttgattttatagttaggtaaattaatttctcgcactcttcgcttgattgtcatttatgggttgaactgttgaagtgattttatattttttaataaatttcacctgcaaaaaaactcaccattagcatacgccccccccccccccccccccccctctcccaaaaaaaaaaaaaaaacgaaagaagattaattagaaagaataaggtcgtgaaatgatgttacaaataaggcatatcagaatcagacgcaagggaagaataaaaacgttacaacaattcgcgcacaatgcaccccaaaaaaaaaatgacaggcacacataccttaaggaagaagaatcaacgctttca

SEQ ID NO: 175 - DNA, 5762 bp, Artificial Sequence; identical to SEQ ID NO: 151
  Synthetic polynucleotide

SEQ ID NO: 176 - DNA, 7394 bp, Artificial Sequence
  Synthetic polynucleotide
ttaaatcggttcaaaattgttgaatcgatccaaaactagtaaatacagtaggttaattgatttcacttgaaatttaaaaaaaaaaaattaaaatgacgtcattttagtttttttttaaattattataacttatatgacatttttaagtgaagtttactttttattattattaatttatgcatactaggtttctgaaatattatattaaaatattatatatatatatatatatatatatatatatatatatatatatatatatatatatatatatatattattaaaatcaattccacttcgattgagctattaacttttgaaccaatatcttccccagttcaatgaccatccaagtctgaaaacattggttaccatcaacgttacccttccgtgaattggaaaagttaatgcaatataggttgatccaaggataagtcctatggtcccagaaagaaaatcttgagagatccttttgataattacccgagtttttactctctccttttaattcacgaaattggaaacttcaattgctaatataaaaagaattttgttagccaatatcatcagggtattgtcaaagaattacaagaaaaaaaaattataagataacataaaaaaataaaaaacaacataattttatatattttaataaaaaattcttttaatttttttttatcaatattctatagttactggcatttgacatgtaaaaatgtaaacatatgaattgataaaatttgaccaatgtttgaccctgagataggaatccaacggccccagttcaattgcaatcttttatttttactacgtgaaggcccaacaatggagaaccttgtggattttattgctgagaatctgtggttacgatgatgacacaccaacacaatcacagaaagcaagtaccgtttggaaggcctaacacttcattaattgcttcattaaatttattttactttctagctgctcaatttaattgctttacacaaatacttcatgacgtttcagaaggagggccaaatacaatctctacaatggttccatcgtatctttgaatttgacatttagcatccctccctttgcacaatgtacaatttgcattttgaatatttttttctcaccttcatatcgtgggactacttctataaccatcctggtgaaaataaataaagcgagggaattacgtaattaaacatatttaaatttctctctcctctgtttaattaatttatcaaaaacaaatatgtgtgcgagtatttaaaaatgtgtaaagtattattattttttaatttttcttttttccttctcatcaatgataaatatactttttaatataaaaatcaaacaataactataaaaaaaacatcttcacttcaattcaacattaaataaaaaataatccctgctttgttattttttacccaccaattatcatatttgttatttattatttttttatgttcttgctataaaggaaatcactatttgactcacacaaaactataaaggaatcaaataatcaattattatttaaaaactctattaaaataacaattacaacaaaatcccttatttttttcttccttatcattattaaaccttcccattctctctttctatctctacatgtttttctcaaattaaatattttctatatcctcctttatcatgcaaattaaagtcctcttccattctatatatagccgctacctcctccacctcctttccccactacaacacacaaacaccaacaaccaaatcaatccatccaccctagaaacaacaaagcactctctcttctctcattctattatcttctctcatcctcttattctctccaaaccaacaaaaaaaaaatggttgctgagaactacccttctcccacatacttcatcctccataaccataacacgtttgatctccacagtgggcaaaacctcccaatggacgaaggccctgtcgctgcctccggaactcgcctccgtctccctcgacgacaccatcttctgcaagctccgtgacgacccagaggccctccagggaagggcctccagggactacgggaacctcgtccgcgaggttcccttggcagtcttccacccagcctcagcgagcgacatcgcgaggctgatcaagctgtcgtacaacggctctgtccccttcaagattgcggcgagggggcaagggcactcgacaaggggccaggcgatggcacgtgagggggtggtggtggacatggcggggttcagagagagagggaatggagtggggataagggttgtgagtagtgtggaccctaataataagaatggttactactattatgcggatgttggaggggaacagttgtggatcgatgtgctacacgccacgctcgagcatggacttgcacctatgtcctggactgattacttgtacttgacgctgggagggactctctccaatgctggcatcagtggccagacattccgctatggtcctcaaatcaccactgtccgggaaatggacgtaatcaccggtaagaaaactttccattcaaccagttaacttacatgtttttagttttttagcttccaatatccaatagtttataacttgtaagcttcaattttatgttaatttataagctagttttaccctacttttgaaaattcaaggattttggtactacaataactcccttgtcaaactcgttcaattgttggcttagtatcaagtagactcttggatttttaggtgtactttaacaaccatgttaatttaattgatcagggttttaatattatggaaattggccattggacaacttggaatggaaggaaagcgggagatggaaagggaaaagaaattaattagaataattgttaatattagttgcgtgaaaaaaattaaatttgctgaattaaattatggttcatcacgactctatttgtggcaacaccaacgtgccgttttcagaacttcattgcaacagcggttatagtggcgtttattcaattcatattttaatgcatcagactgtgattgcgattgaaattttatgaaatcttgttttataaacttgttcttttgattaggaaacttgattctattttatatatatttaatgtaacgccgaattaatggttgataaacgagtctttgtctaaaattttggcgaatgttagcaagcgttttccacgtggtcccgtacgtgtttgaaaaattcttaatcatggaatcagttcacacgggcagtcatagactcatagactccaattcttgattaattgttttcttattaatattggtccatggtcttattttggtcaattctttttattaaaaataaacgggctgctgaattttaatttactcaagtgtttgttaatgaatatgtgtgcatgcatgcaattatatatatatatatatattactattatttatttgtgttttaatcaaattttggtttggttcaggaaagggagaatttgtgacttgctctcagcagacgaattcggagttgtttcacgcggttcttggaggcttaggacaatttggaattataacaagggcaagaattgctcttgcgccagctccgaagagggtacgtttaaaatcttcggaattgactaggacttgtcttgttgcttcttcctccaacatctctcatatagtaacgcaaatttctaaatatgttacattattaattcaaccaccaagctttgcggaagcatcaaatgtcgttgtcctgaaagcttcatgtcatcatttttcttggcacccatatacacacacatacgtttcacattgtgtcagtgcatattagtcatccatgaaagacacatgtacaaatgaaaacgagaggagttatattaaaatgtgtgttggaaaaatatatatcatattttcataagtcttaattttgaaattaatatacagtaaccctttgagaccttagcaattaagccaataaaaaggctcgtattaaccccaaccaacaactattagaaaatactaacaagtataggtgtatacataaatgattcatttgaattttagtaccttaattatttaactttatccttctatttgacgggactcgttgcataagccatacatacataatcatgcgttcattattgtttttcattatgagttaatgagttgattgtatgaactaatggtgaatttttgttggcaggttaaatgggtgagacttttgtacaatgacttttctgcttttaccaaagaccaggaacaactaatatctatcactggaaggaaacaaaatgtttcactggattatttggaaggattgctgctaatgcaccaaggacccataaataattggagatcttctttcttccctttagccgaccatgcccgaataatttcgctagtaactaaacacagcgtcctctattgcctagaagttgccaaatattatgatggccaaaatgaaaacaatgtggacaaggtaccatctccattcatgtgcatttgccttgatgatgtttcttctattttttcttttaatgttttgatctcaccttatataataaccctttatcacactcaatcttgttatatttttaagagtttaatgataatattatgattttgttgtgaaaaaagagagtttaattgttattatataatcacaaattatcattaatatgacttttaaaataattaataatataaaaattaataaatttatcgtatttaatgagttataattaaatgatcatataaaattattttatattattaacatatagtttttttttctatttttaatatttgttttactataagttgttatattttcaatcttttttctagtataagttttaataatcaatattgtaagtaatattctcatttttcatgttgtgtaggaactccaagttttactacaaggattgagctatatccctggattttactatgaaaaagatgtctcatattttgagttcttgaatagagtccgaagtggagagttgaagctacagtcacaaggactatgggatgttcctcacccgtggcttaatttgtttataccgaaatctcaaatcatggaatttgactcgggcgtgttcaagaatatcatccttaaacgaaacatcaccacaggacctgtcttggtttaccccatgaatagaaacaagtaattgagcttaactaactaatctcaacttatgttgttatcattaggaaaaatgttaattggtacgaaaactatatataccactattttcatttaaattcatgaaagtgaaatttctctttcctaaaacaaattctttctcttaaaatgaatttttgtttttctcaatctccatcaattacttatttccttttttgaatgtttgaaaagtcattcacaacattttcttcataaaagggttattcgtaccaatttaaatagaattgccgttattatcagatgtacaattcttctcttcactcacttcttttccattaaaattgtaaaaaaaaaataaaaaaatcaggtgggacaataggatgtcagcatcaatacccgatgaggatatcttctacacagttggatttttgcattcaagtgggtttgataattggaaggcctatgatgctcaaaataaagaaattctacaattttgtaacgttgctgggatcaaggttaagcaatatcttccccactatcgcacacaagaagattgggcaaaccattttggccctaaatggaggacttttgtagaaagaaaacaccagtttgatccaagaatgattctatcacctggacaaagaatctttaacaattaaaatagctttaaaaatatatattcccccccccccccccccccccaaaaaaaaaaaaattatataatatggtgggactacccaagttagctagctggctgatcacaagtgtgcacataggacccagaattcagatgatagcctttgtacttgtttttgttaagagggtggggttaaaagctgcatgactttggcatatatgtagatcaggttacacatactttagatacgttaggttgacaaaatcatgtgtgaaataagatgcacacagctagctgtgtacctttctttctctctgtccctcaatttgtctatcactaaaaagatttctatatagtttagaacctagtgaagagaaagaaaaaaccattatattgaggatttaattttatcacgttctaatcctatacattaatattcttaaatgtgcaatgagtgtgctcggtgccttaatgattctttatctttgttaattgttatattgtagggttttgtttttgccttcctaattttgtaacaggggcacccctagcaataattgagatcctaggttaactaaggaacagcattattgtgtctaaattgagattcctagctgtatgccataataataaatcatcgtaggttgctagatagatgtgatagcgccaaatgccttccaatactataatctccattgcaagatccttcgttgtgattgtgtagaaaagattacgctgctttacaagagaatactccaagaaagcaagtgattgctccttaatataaagaatcatgcaataaacaaatggtgtcgtaatccataaagtgtatttaatatttgatgaaagagtagtgtagacatcaaacaaaataaagtttgatgcaattcgaattatagatacttgattaatctctaaattatgttgagacaatcatatttgaatttgataagactattatgaacgataaaaaatattataaataataaaaaaatttcatcaaacatttaatacaattatataccttactcaaatttgaaaacctgtacatataggaaaaaaacctttactaaaagaggttaaactcaccatacggatttttatatgtcgaagggatctttaattgtccatcggaaaacatcctaattcataaaaaaggaaagaaagtttagacatgaataattacggaccaatgaatgcaacctacgtctctcaattttaaggagaatttaggaatattatagtatatcactgaaagtacacacaagtggcaatgatgaatattttaatttaaagttttaattggattcgaaattaatcccttcttttttccagaaaaaataataatcatcgagtaatcaagacaatttcccaagtagacaacaagaatacaaaagagaatacgtgacttcgtttcaccatagaaaagaaggaatgcaataacgatgataataattataaaatgaaattgacaaaatatctaaatgcctgtagatatttctacagcgaatgataagtgtttttccattaaaaataagtttcttttgttaagaatttctaacatttttagttccaaaatataggaatgaagccaataagtaagtaagaatttctaacgtctgaaag

SEQ ID NO: 177 - DNA, 7386 bp, Artificial Sequence
  Synthetic polynucleotide
ttaaatcggttcaaaattgttgaatcgatccaaaactagtaaatacagtaggttaattgatttcacttgaaatttaaaaaaaaaaaattaaaatgacgtcattttagtttttttttaaattattataacttatatgacatttttaagtgaagtttactttttattattattaatttatgcatactaggtttctgaaatattatattaaaatattatatatatatatatatatatatatatatatatatatatatatatatatatatatatatatatattattaaaatcaattccacttcgattgagctattaacttttgaaccaatatcttccccagttcaatgaccatccaagtctgaaaacattggttaccatcaacgttacccttccgtgaattggaaaagttaatgcaatataggttgatccaaggataagtcctatggtcccagaaagaaaatcttgagagatccttttgataattacccgagtttttactctctccttttaattcacgaaattggaaacttcaattgctaatataaaaagaattttgttagccaatatcatcagggtattgtcaaagaattacaagaaaaaaaaattataagataacataaaaaaataaaaaacaacataattttatatattttaataaaaaattcttttaatttttttttatcaatattctatagttactggcatttgacatgtaaaaatgtaaacatatgaattgataaaatttgaccaatgtttgaccctgagataggaatccaacggccccagttcaattgcaatcttttatttttactacgtgaaggcccaacaatggagaaccttgtggattttattgctgagaatctgtggttacgatgatgacacaccaacacaatcacagaaagcaagtaccgtttggaaggcctaacacttcattaattgcttcattaaatttattttactttctagctgctcaatttaattgctttacacaaatacttcatgacgtttcagaaggagggccaaatacaatctctacaatggttccatcgtatctttgaatttgacatttagcatccctccctttgcacaatgtacaatttgcattttgaatatttttttctcaccttcatatcgtgggactacttctataaccatcctggtgaaaataaataaagcgagggaattacgtaattaaacatatttaaatttctctctcctctgtttaattaatttatcaaaaacaaatatgtgtgcgagtatttaaaaatgtgtaaagtattattattttttaatttttcttttttccttctcatcaatgataaatatactttttaatataaaaatcaaacaataactataaaaaaaacatcttcacttcaattcaacattaaataaaaaataatccctgctttgttattttttacccaccaattatcatatttgttatttattatttttttatgttcttgctataaaggaaatcactatttgactcacacaaaactataaaggaatcaaataatcaattattatttaaaaactctattaaaataacaattacaacaaaatcccttatttttttcttccttatcattattaaaccttcccattctctctttctatctctacatgtttttctcaaattaaatattttctatatcctcctttatcatgcaaattaaagtcctcttccattctatatatagccgctacctcctccacctcctttccccactacaacacacaaacaccaacaaccaaatcaatccatccaccctagaaacaacaaagcactctctcttctctcattctattatcttctctcatcctcttattctctccaaaccaacaaaaaaaaaatggttgctgagaactacccttctcccacatgttcataaccataacacgtttgatctccacagtgggcaaaacctcccaatggacgaaggccctgtcgctgcctccggaactcgcctccgtctccctcgacgacaccatcttctgcaagctccgtgacgacccagaggccctccagggaagggcctccagggactacgggaacctcgtccgcgaggttcccttggcagtcttccacccagcctcagcgagcgacatcgcgaggctgatcaagctgtcgtacaacggctctgtccccttcaagattgcggcgagggggcaagggcactcgacaaggggccaggcgatggcacgtgagggggtggtggtggacatggcggggttcagagagagagggaatggagtggggataagggttgtgagtagtgtggaccctaataataagaatggttactactattatgcggatgttggaggggaacagttgtggatcgatgtgctacacgccacgctcgagcatggacttgcacctatgtcctggactgattacttgtacttgacgctgggagggactctctccaatgctggcatcagtggccagacattccgctatggtcctcaaatcaccactgtccgggaaatggacgtaatcaccggtaagaaaactttccattcaaccagttaacttacatgtttttagttttttagcttccaatatccaatagtttataacttgtaagcttcaattttatgttaatttataagctagttttaccctacttttgaaaattcaaggattttggtactacaataactcccttgtcaaactcgttcaattgttggcttagtatcaagtagactcttggatttttaggtgtactttaacaaccatgttaatttaattgatcagggttttaatattatggaaattggccattggacaacttggaatggaaggaaagcgggagatggaaagggaaaagaaattaattagaataattgttaatattagttgcgtgaaaaaaattaaatttgctgaattaaattatggttcatcacgactctatttgtggcaacaccaacgtgccgttttcagaacttcattgcaacagcggttatagtggcgtttattcaattcatattttaatgcatcagactgtgattgcgattgaaattttatgaaatcttgttttataaacttgttcttttgattaggaaacttgattctattttatatatatttaatgtaacgccgaattaatggttgataaacgagtctttgtctaaaattttggcgaatgttagcaagcgttttccacgtggtcccgtacgtgtttgaaaaattcttaatcatggaatcagttcacacgggcagtcatagactcatagactccaattcttgattaattgttttcttattaatattggtccatggtcttattttggtcaattctttttattaaaaataaacgggctgctgaattttaatttactcaagtgtttgttaatgaatatgtgtgcatgcatgcaattatatatatatatatatattactattatttatttgtgttttaatcaaattttggtttggttcaggaaagggagaatttgtgacttgctctcagcagacgaattcggagttgtttcacgcggttcttggaggcttaggacaatttggaattataacaagggcaagaattgctcttgcgccagctccgaagagggtacgtttaaaatcttcggaattgactaggacttgtcttgttgcttcttcctccaacatctctcatatagtaacgcaaatttctaaatatgttacattattaattcaaccaccaagctttgcggaagcatcaaatgtcgttgtcctgaaagcttcatgtcatcatttttcttggcacccatatacacacacatacgtttcacattgtgtcagtgcatattagtcatccatgaaagacacatgtacaaatgaaaacgagaggagttatattaaaatgtgtgttggaaaaatatatatcatattttcataagtcttaattttgaaattaatatacagtaaccctttgagaccttagcaattaagccaataaaaaggctcgtattaaccccaaccaacaactattagaaaatactaacaagtataggtgtatacataaatgattcatttgaattttagtaccttaattatttaactttatccttctatttgacgggactcgttgcataagccatacatacataatcatgcgttcattattgtttttcattatgagttaatgagttgattgtatgaactaatggtgaatttttgttggcaggttaaatgggtgagacttttgtacaatgacttttctgcttttaccaaagaccaggaacaactaatatctatcactggaaggaaacaaaatgtttcactggattatttggaaggattgctgctaatgcaccaaggacccataaataattggagatcttctttcttccctttagccgaccatgcccgaataatttcgctagtaactaaacacagcgtcctctattgcctagaagttgccaaatattatgatggccaaaatgaaaacaatgtggacaaggtaccatctccattcatgtgcatttgccttgatgatgtttcttctattttttcttttaatgttttgatctcaccttatataataaccctttatcacactcaatcttgttatatttttaagagtttaatgataatattatgattttgttgtgaaaaaagagagtttaattgttattatataatcacaaattatcattaatatgacttttaaaataattaataatataaaaattaataaatttatcgtatttaatgagttataattaaatgatcatataaaattattttatattattaacatatagtttttttttctatttttaatatttgttttactataagttgttatattttcaatcttttttctagtataagttttaataatcaatattgtaagtaatattctcatttttcatgttgtgtaggaactccaagttttactacaaggattgagctatatccctggattttactatgaaaaagatgtctcatattttgagttcttgaatagagtccgaagtggagagttgaagctacagtcacaaggactatgggatgttcctcacccgtggcttaatttgtttataccgaaatctcaaatcatggaatttgactcgggcgtgttcaagaatatcatccttaaacgaaacatcaccacaggacctgtcttggtttaccccatgaatagaaacaagtaattgagcttaactaactaatctcaacttatgttgttatcattaggaaaaatgttaattggtacgaaaactatatataccactattttcatttaaattcatgaaagtgaaatttctctttcctaaaacaaattctttctcttaaaatgaatttttgtttttctcaatctccatcaattacttatttccttttttgaatgtttgaaaagtcattcacaacattttcttcataaaagggttattcgtaccaatttaaatagaattgccgttattatcagatgtacaattcttctcttcactcacttcttttccattaaaattgtaaaaaaaaaataaaaaaatcaggtgggacaataggatgtcagcatcaatacccgatgaggatatcttctacacagttggatttttgcattcaagtgggtttgataattggaaggcctatgatgctcaaaataaagaaattctacaattttgtaacgttgctgggatcaaggttaagcaatatcttccccactatcgcacacaagaagattgggcaaaccattttggccctaaatggaggacttttgtagaaagaaaacaccagtttgatccaagaatgattctatcacctggacaaagaatctttaacaattaaaatagctttaaaaatatatattcccccccccccccccccccccaaaaaaaaaaaaattatataatatggtgggactacccaagttagctagctggctgatcacaagtgtgcacataggacccagaattcagatgatagcctttgtacttgtttttgttaagagggtggggttaaaagctgcatgactttggcatatatgtagatcaggttacacatactttagatacgttaggttgacaaaatcatgtgtgaaataagatgcacacagctagctgtgtacctttctttctctctgtccctcaatttgtctatcactaaaaagatttctatatagtttagaacctagtgaagagaaagaaaaaaccattatattgaggatttaattttatcacgttctaatcctatacattaatattcttaaatgtgcaatgagtgtgctcggtgccttaatgattctttatctttgttaattgttatattgtagggttttgtttttgccttcctaattttgtaacaggggcacccctagcaataattgagatcctaggttaactaaggaacagcattattgtgtctaaattgagattcctagctgtatgccataataataaatcatcgtaggttgctagatagatgtgatagcgccaaatgccttccaatactataatctccattgcaagatccttcgttgtgattgtgtagaaaagattacgctgctttacaagagaatactccaagaaagcaagtgattgctccttaatataaagaatcatgcaataaacaaatggtgtcgtaatccataaagtgtatttaatatttgatgaaagagtagtgtagacatcaaacaaaataaagtttgatgcaattcgaattatagatacttgattaatctctaaattatgttgagacaatcatatttgaatttgataagactattatgaacgataaaaaatattataaataataaaaaaatttcatcaaacatttaatacaattatataccttactcaaatttgaaaacctgtacatataggaaaaaaacctttactaaaagaggttaaactcaccatacggatttttatatgtcgaagggatctttaattgtccatcggaaaacatcctaattcataaaaaaggaaagaaagtttagacatgaataattacggaccaatgaatgcaacctacgtctctcaattttaaggagaatttaggaatattatagtatatcactgaaagtacacacaagtggcaatgatgaatattttaatttaaagttttaattggattcgaaattaatcccttcttttttccagaaaaaataataatcatcgagtaatcaagacaatttcccaagtagacaacaagaatacaaaagagaatacgtgacttcgtttcaccatagaaaagaaggaatgcaataacgatgataataattataaaatgaaattgacaaaatatctaaatgcctgtagatatttctacagcgaatgataagtgtttttccattaaaaataagtttcttttgttaagaatttctaacatttttagttccaaaatataggaatgaagccaataagtaagtaagaatttctaacgtctgaaag

SEQ ID NO: 178 - DNA, 8267 bp, Artificial Sequence
  Synthetic polynucleotide
ctacttctagaatgacaactactcctatggcaatatcaattgttagcggtggttcccttaagttcgagactaagggcagtctccaaaaggaagaaaggaaataacaaacttaagcctgaatgttctacgttttatttagtgtctcttgatatttaaaggtctatcaaatatgtataataaccgcacttccactataataaccacactcccactacgataatcgctacaataaccaccacaataactacttctaggatgacaactacctctatataagtttccatgacagaacatcttcttcctaacaccttacctatcacaaatgcttctcctctcggtgtcagagagtactattgattccctaagttctgacggtgtctttttctaaccaaagatccacttttcgaaggtcccgagccaattcgatgagagctcggaggcatagaactcggtttagtcacttatgccatgcttcatttcgtcgcgcgtactttaccaatcaacacacgccatcgagattgatctgcaagtgcagattacgtaagcgagaaaggatttgcaatggaattcacaaatcgcacaatcagagaacaggataagtgtactgctaattatgagcgccagggagtgtagattcatgtcttaggttttaaaattagaacagaataaatatgaaaattgttttttactttctatattttatattttaatttttttttagtttttattattagtaatattgttaattataattaattataaaaattttaacaagtaatttattactaatttatcataagataatttataataaaaaaataattgataatttataattaatttataactaattatttttatattttgtttagtaaagactaaaaggtaattaaaatgtaaattatagagattaaaatatcatttttaaactataagaactaaaaaagaattaaaatacaaactataagacaaaaaagatcacttttaaactataggaactaaaaaaattacttttaaattatatggactaaaaaataccaatcgtaaaattataggaactaaataaataatataaccttaaattttttattttaagatcaattttttaaaaaattaatgttaatcatgatattttatttataaaatatcaaaactcattttgtaaaatggattttcatcaaaataaacgttcactttgctatggtaaatcttgttttgtagtattttggttgttctgacccaaatgacccaaatgcaggctagtggacaatgacattgattgttttgtatatgggttgggtgtcccttgtatcctattgatatattccttttgccttattaagaaaaattgcattagaaactactatatattaaatgctctaacaattaatgattaaattgacaccacatcctgtttgactctccacttttcttttattggtactctctattttagtctgctctttatatacatgttaacttaaagacagcaaatttaccaaagtaacttatcttctctcttgaaagaaaaatgccacagaggaatttagtactattttccacaactatggttgtgctagcatagtgctcacacaagcacaaccacgatcatggtcagcattccaagcatccaaagaactagccacaaagcttagtcgtaaccctcaaacctttccacatgcctcaaccgattatgggcacatagttcacaaaaccccagtggcaattttcaatccatcttctgttagtgacatcttggccttgatacatttctcaaactctcttcctaacccattccccatagcccctagagggaaagcacactctgttcatggacaagccatgacaaaagatggggtggtgttgaatatgactaacctcaatagcagttttcaaaatgggttaggggttttggtgtctgcttgtgatggaaaaggtccattgatttgttatgctgatgtaggtggtggccaaatgtggatcgatgtcttgcatgcatcccttgaacgtggactcacacctttgtctttgactgattatatgtatgccactgttgggggcacactatctaatgctggcatgggtggcatgtcctttcgatttggacctcagatctctaatgttcttgaattggatgttattacaggtatgactcactcaattttatcaattaattttcttccatactcatctacacgcttgttcgaagtgaaacatttaactgaattttttttatcttggatatcacaattgtgtaatttttcgtctagatttgtgattatgttaattcaatctgtatatcttaataattatattaaagtccctccctccttcaattatctgtcaaatatttaacgaaatatatttatgtgacatttgagaatgttgatgggtttatatgtgttattttagtcgattagattttacgtgtgaagttttagtgtctcccaaattcttattaacattgtgggaaaaaatgagaaaacaatcgcagaactggagtttgattccagattattattattatttagtaattttattattatctatatcataatagtatatttattaactcatttaatatcatatttattacatatatttagtgtaataatagtatatttattacattctttttacatacaaaaagtcagaaagacttaaaagcttctacaaaaagaaatacctgttatatcagctcttaaagaattacatatgaaatcctacgcatttattacacacacacaaatatatatatatatatatacttaaacagaaatatgaattgttattatatttataattagtatttatattaatagaacaatttatagtttatactatggaataaatttttaaatataaatttattatttatattgatatactcatttatagtttttactaagatataagtttataaatataaatttgcacctcttgtgattttgaactggttttttaataaataaaaaataaataaaaagattataaatataaattattattacattaacataataatttacatttattaatttaatactaaatatatatagtaaatgtatcattaaatgaatgtagtaaacatattattaattttcagaaaagttttaatactttttcaccctagaaatatacaaattttttttaattgatataatttttttttgtttatgattcttgtattaatatttaaaccttccgttggagattaacgggtaaaaaatacaaggtttaaacattatataagtaaagttttcttacaacgacaaaacaaaactaattaatatatttacagctaatgatgtttgtttaaaaagtgctaattatatttttttgttctagtcaatgttgtatagttacccaacatataatcagtgacggactttttagttgtggggaaatattcattatatatatatatatatatatgaatcggtgctgcatataatacaatatatacaattttacactgaaaactgtatattattaaaatttatcaggaattatgcttaaatatcttattgtatctatcttattaaagaaatctaattatatctataaaataaaggtttatttcgatcgttttgatatattgtaaatattattttttttgtttgtttttctcgtataaactttaatacatctatatatgtggcttttatatatagggaaaggagaccttgtgacttgctccaaggagcagaactcagaggcattttacgctgctcttggaggattaggtcaatttggggtgataacaagagcaagaatacctctaggacctgcacctactagggcaagtattagtttcccctttcatatagatttcgtaagggtgaaaataaaaataatattttataggactaaaattaaactaatttcatataaacctaaattaaaactcactcaaattatagatgtattaaaatcatatttaatctatatatatgccatttaattttaattgaaacatacatattatatatagatcattttttcctgtaaacttagtcttagacactatacaacttcaatactattaaaattgtaccaaaattaactatcttaaaactaaaaatgagaataagtcgggtaattgacataagtctatgagctcacttgtttaaagcttggtctcatctatctaataaaaaaagttaaacttaaactttttaaaaagtctatttatttatataatttagacttggacttgtgaaaaaacttattaaactgtatagaccggtctaattattcatttaaatatagtaaaacattaaaatatattatacttttattttaatatcttaatatgttaatatatttttatcataaataaaatgaatatttgaaataaatagatctttaaatatgtaataagctaaactatatcatatcttaatttttataacatgccatacctatatatttatataacgtctaacttgacctaacatattatcacccctacttaaaaattatttatctatttatttttaacaaagtttttttcatgtgggtgtttgcaggtaaaatggctccgcctgctatacaacaacttcactgcattttcaagagaccaagaacatttaatatcgttcagtgaaaggaatgacattgctacagcagattatgtagaaggcatgcttctattgaatcagccgccactggatcttctcttttatccagcttctgatcatcaaagggtaacttccttggtaactcaatatggcattatctacatcttggagcttgccaaatactattacaataactctcaggcacatgtcaatgaggtaacttgaaataaaagttgtttttagcatctagttagaaacttcttttatttttattcttatttttttatggacaacatatataatgaatttagtaaagaaatacagagatattctaattgttatatattcatcatacatcaaagatcaaattaatcctcctgattgaaaagaattttgttttcatgaatccaaaagaaacatgtctcaaactcactcaaattgtatggaacccatatattaattaatttatgtacaattcattgttttttactaaattgattatttttcttgtttcttaaataggaagttgcatatttgctgaaagggttaaactttgtacatacatttgtgttcgaaagagatgtgtcatacgaggagtttgtgaacagagtttatcctttggagcaaatgcttaggtcagaaggactttgggaagttcctcacccttggctgaacctctgggttccaagatctagaatctcagattttgatgaaggtgttttcaaggacattgttcttaagcaaaatattactggcggaagttttctagtctacccaacaaacagaagaaacaagtaaattgattagattatttatttttttgtgagtgtcaaattattatctagatcacccgtctcctttaatttacatatcctttctagtgtttccaatatataaaaaaatgacacctcactaaaaaaaataacaaataagagaatttattgttttttaaccacatttttttattgagagaaaacactccacaagaaaaataataataacaacaaaataatttatgtaatttttaaaagaaaaggtcacttaaatttttgcaactctaaaattagttattgaaaaaaaaaacctcaagtctcacatttactagaggaacctcctaagttttttctaaaatgaatatatttctaaaggatatgagacttaaagttttttcaatattaatttacaacattgtgctctgattcaaagtcaagcaatctcctagaataaaagagattgaaaatagcactaacactattggtggggtttgtggtttgtggtctgtggatttaaatttggcatgtggtatttaacagaacttcaacagaggtataaattataaaagatttttttttctgagaaaaagaaataaatggaggtatgttattaaaagagggagtatgaataacaactgtcctaataatactccattgggcctgacagtaggagttgggccataacaattagggacaaaaaataattttggttactaaatttagtcaataattccttttcttagtcacattagatgtttctgttccaatttatttgcttatgtaaatgacttaatttatacatatgtgaggattaaattgaatcaacattatgcttcacaggtgggatgataggatgacaccaattacacctgacgaagatgttttctacgttgtagattttttgcgtgttgctaaaacgtttgatgtggtggacaaactacaggttcaaaacaaacagatactgcggttttgtaatgatgctggtattaagatcacagagtatcttatcgggaacaaaactcatcaacaatgggtggaacactttggcccaaaatggaaactttttgcagatagaaaaactgaatttgatcccaaaaaaatattgtcacctggacatgggattttccagtaaataatgtgctaggtttcagtgaaatctctcattttggaaattcatgaaataaaaatgaaattctgtaccagaaaaaaaaaaaaaaacttgttgtgtaattctgtgccaaacatacattgaattggattgaagttattatgcaattttgtacgaaaaaaaacttatgtatttgattattttatgtttttttattaatgttgaatgttcaaatattctcatgactcacgaacaacggcagatctagaagaaaaaaatggtcgtaagatgtgttgatggtatttaaatgaatgcatgtctacttcaaaatttatttgatagactcatttcgtaaaaaaaaaaaatagaaataacctatttaacaatacttgtttggaaaataaatttaaaaataagaaatttggtcgtttttttatatagaaaatagcattgtttttatgatattttaatgcaattcacgattttatgttgttgggtttttaaataaataaaagttacataaaactttagttttaaattttctttgggactgtgaatggagttaaactctaaaaaagatctataattccaaagtcaggttaccatcaaatattgacatatagcaaaaaaaaaaactactcccttgggaaaattatataaaatattaccttgtcaagagacttgcatttatacaaatgatttatttagcaaaattgttgcatcatgatcaaataggacaaacgttgctaaatcaatgtcactaggcattggcacccttacaagttacaagatacctttaagaaatcgaaaactatttttttcaaaccctttgttttgtgaattaactctttatgagctattttatccctctcaatcggaatataaagagatttttccttacatgacactagtggtctgatcctaagtttgagcttgctcgatgataagcaatgattttaagttttgggtgagaatatataaaaacattggttggagcgttttttgtttttatttttaaagaaaataaaaaataagaatgaaaatatatttatttaaaatttagaaaatattttttctgaatatatttttgaaatagaccaaaaactgaaaataataaatcaacattttcagtcttgtttgaaaaggtgaaaacagcgtggtaccttagagtgctttcttcttaatacattttttttaatcttaaaaatttgaaaatgaaaataaaaaataaacgctcaaatcaagctccacctaaatttttctctattgcaaatgttgaaaaaaatggaaaagcaaaagatctcaaagtaaaataaatatattgtcttttgttacattttgtttcaatgattgtggggaataattgaggtaggataagtggtaggaaaaaatatcaagcaacggataatggtaattgttttatataaaggtttaaatatatttttagtcttttaatttaaaattattattattttttagtccttaaaaacaaatatgcaaattttagtaatctaaaattttaaaatctagttttagtcttgttttgttaactctataacagaggttgtctgtgtggaaaatgatgtgcaattttgtggcgatttctttagtgtgaaaattttgttttaaatttaaatcaaacaaaatgtctcgcaaggcaacaataacgttgttgctgctaacaatcttcgtgtggcaaaatcaacagtggagaaaacgactatcaacaatgttagagaagagttgacgaaggaaaatggggaaaataggacaaacccgaacaaaaaaaccacccttgacttg

SEQ ID NO: 179 - DNA, 5767 bp, Artificial Sequence; identical to SEQ ID NO: 165
  Synthetic polynucleotide

SEQ ID NO: 180 - DNA, 5736 bp, Artificial Sequence
  Synthetic polynucleotide
ataaatggtagaaatctgtgggttcaaatgttcaattgctggggatcttcgtgatcatgatgattcatacacaatctctagaaacacgtacgcaaatattaattaatcaatttcctttttatagtctcctcacaattcacatgaaacttcatactctattatccgattccatttccatcgtatctttgaatttgacatttgtttgcccaacatgtaattaactttcccttctcatcttaaagatgtaacatgatatatattataacttgtaattaacccaatatttttaactctctatttttacactcatctgacatgtatttttatttttcatttttttttcttatcacatcacctcttacgtgtacaatttttctctttttcttatttctgtcttccataatagtaattaatattcatcggtccgatatgtatacagcccaaaaaagtgtgtaaaatcatttttgtatttctaaccctctctttctcatgcaagctagcttcttctttctatttatagcccttctcccttcacccaccaacacaccacaactccaaactttttcctcttgttctcttcttcttcaacacaactagtcataatccagctcatctctctctccctctctctttgttctctctttctctttctccaaaatggctctaaactacccttttttaacctacttcatactactgctagtaaactgagcaatggaaagctccgattctaccagagcttgacattgataacatatcccacaaactccatgatgaccctgaaaccattcaaatggcttcaagggactatggccatttaacgcatgaattcccattagctgtgtttcgtccatcttctatagatgacatagtcaccttgataaaatcttcgtacaatagctttgccccttttgacatagctgcgaggggccaaggccactccactcatggacaagccatggctcgtgatgggattgtggtggacatggccagcctaagaaaacaaagaaatggggttgcgattagtgtctctaaggaccctttgatgggtcactatgctgatgttggaggggaacaactctggattgatgtgctacatgccacacttgaatatggacttgcaccagtttcttggactgattatttgtacttgaccgtgggagggacactttctaatgctggaatcagtggccagagcttccgttatggacctcaaatcagcaacgttcatgaaatggatgtcatcactggtatggagttagttgttttttttaatcaataaatgttaatattattagcttgttagttttttttgaaaaaattgaattaactttcgtttcctcttttctttctttttttaaccacacaattaatctaataactactggtattaagttagtttattttccatttttcatatataagttaggatttctaattaaaattgacatttcgtaccaccactacaaaaaaataatgtatcagtggcacaaaaaaatatattggcatcacttgtttttttagtcattaatattttgtagcatcacaaaaaatatggtgacaagttttctaaaaattacaaattaactgattcgtcagtgatgttaatgattttttagtgcgtcttggcaactaatgttttcatcttatataaaattagaaacaatagcggcaacagcacctgacattgtgtttgtgttttgcgtgtttctatcgcctaatttttgttgagaacgtgttcgtgaaacttggaaaaagagaaaattgaaattttcttgagatatctaccacttaagaaaaacaaatggctgtttccgttttgtctcttatgacatgacatggtacgtcatagatgaagttctgctaaatatatttgatatgatttcttgaacacgttttatatattcccacttcccagttagtgtggttgttgaatctaattaaaacaggaatagtctttgtctacaatatgggtgagcgatgcaaactttccaagggtttagaagttagaactatataggtccacggtcataattttatattcttgattaactttatgttggttaagtcgttcatatttggtcaattcattcatatgagaaaatactgaaatacaaacatggaaaaatgttaattactcttataattggcgcatgcatgcatctaaattatatgattttaataaatagtttttgtcatctacttgatttcaggaaaaggagagttcgtaacatgctcttcacagaagaacttggagttattccacgcggttcttggaggcttgggacaatttggagttatagcaagggcgagaattgctcttgagccagcacccaaaagggtacgtttatagagaattgactagaattttgtcttgtagcttttcctccaccaattcatatagtgacacctaatcgaattgtcatttttttttacggtgaattgtcattttgtaaatctaccaagtggtagttggcacccatatatgtatgaactatagtaccatacatttcattttatgttggtgtgttagtcatccatgatgaacacatacacaaatgaaaataggacgagttatacgtacgtaagggtttgaatcactgaatgtggatttttgaagttgaaagcatattaatcttggtttgaaaaagaaaaaaaaaatcggaagtccctcttgaagttatcatgactcttatattaagccaatagaattagaaaaactataattatgaatgatcatgttaattctttcagtgacttaaaatcttatctacaaaaagtacccttttgaaaaagaccttcacttaagtccatgcatacagtactaatcttacatacttgagagttgagacttgaagcatgaggagatttgaagtctggagaaacaagccaccacatattaattactaccgtattcttatctttatttatccttccaattttgatgggactggttgcacatacattcatacatactaacatacataaatacgtctctctctcatgtatttcattttattatattctatttcgttagtaagtttactagtataagacattattaatggtgaatttttgttggcatgcaggttaagtgggtcagactactttatagtgacttttctgcttttaccaaagaccaggaacgattaatctcaatcaatggaaggaaacaaaagaacgcattggattttctggaagggatgctgctaatgaaccaaggccccataaataattggagatcctctttcttccctctatctgaccatcccagaatagcttctttaataactgaacatagcatcctctactgtcttgaagtggctaaatattatgacgaacaaaccgagttaaatgtggacaaggtaacctcgtctagtcatatctattatatatagttagatcttgtcacatttctttgtttaaaaaataaaataaaaggcacaatcccaaaaagtcaaaagcaaatgcctagatattgtgtgttttcttggatattaattattacaccttaataacccataataatttttttatttttctttgtctctgtaggaaattgaagttttgctccaaggactagcctatatccctggatttaattatgagaaaaatgtctcgtacgttgagttcttgaatagggtccgaagtggagagttgaaacttcagtcacaaggactgtgggaagttcctcacccgtggcttaatttgtttataccaaaatctcaaatcttggattttaattcaggagtattcaaagatatagttcttaaaagaaacatctcctctggaccagtcttggtttatcccatgaatagaaacaagtaagccttgaatgcatgaatcacaatctagtgtcattataattcaggagtgtgtgatgcaatcttttaattttctgaccattcaactcaatatcaattttatttcttttttcaattaaaatgcaaaagagaataataattaataatatgaaatttaattccaggtgggacgataggatgtcagcatctataccagacgaggatgttttctacacagttgggtttttgcactcaagtgggtttgatacttggaaggcatatgatgctcaaaacagagaaattttggagttctgtagagatgctggcatcatggtcaagcaatatcttcccaaccacagcacacaagaagattggacaaaccattttggtgctaaatggatgaaattcttagaaagaaaacatcagtttgatccaagaatgattctatcacctgggcaaaaaatcttccacaaaaaattacagccagtgttttaaatattttccctaataaaaaaagtaaaaatgttttgtggtgggactacctcaattagatggctagctagggacaggtgtacatacagtgtgaccaagaccaagatggcttttgtatgctaaagtttgcattgctagctagagaaattaataaggtggggcattaaaggctgcatgagtacttttggcacctattatgctacatattaccttagatacgttaggttgacaaagtcgtactggtaggtacaagaagcacagttgtctctcacactgtctgtcacccaacttgctatatagtgtgtggagaaattcggatcatattgaagatgctgtgagttatagtcctccaatattaaatgtttaacgattctgtctttctcttatataattttgttttgcattatattactttcgcactggtgcaaacatatatatcaatgattataattaatttatacaatgacgagtataattgtacccaagttgcatgccataatatttgtcaaaaacaaaaagttgtatgccataatcaatccaggttgctagataataagatagatatgaatatgataacataaaatgctattaaagcaacaaataaacaataacacatagtccttatagggttcataattgatcgatgaacctagctagacgttgattttaggttaatttccagcgaggataaaatttattatataaagaaataactaaccaacacaaaataataaaaaattaaaaaaaaacgaagaaacttattttagagatataatttgttttagtatttgattgtaatttgagagattagctaggctctcaccaagtgagatctagagtatattcttaagaaaatatttataataaagaacccttaaacattttgcaaaacaaagggtggaattaatattaacaacaataattataatatcttgaaaattttatgaaaataatatatatatatatatatatatagagagagagagagagagagagagaaaattctcacaaacaatttttatctgttatttcaaattggtgtatgactccttagtccttagttcatttgtttgcacccagtcctgtcttaggtagttgattttatagttaggtaaattaatttctcgcactcttcgcttgattgtcatttatgggttgaactgttgaagtgattttatattttttaataaatttcacctgcaaaaaaactcaccattagcatacgccccccccccccccccccccccctctcccaaaaaaaaaaaaaaaacgaaagaagattaattagaaagaataaggtcgtgaaatgatgttacaaataaggcatatcagaatcagacgcaagggaagaataaaaacgttacaacaattcgcgcacaatgcaccccaaaaaaaaaatgacaggcacacataccttaaggaagaagaatcaacgctttca

SEQ ID NO: 181 - DNA, 7390 bp, Artificial Sequence; identical to SEQ ID NO: 132
  Synthetic polynucleotide

SEQ ID NO: 182 - DNA, 7394 bp, Artificial Sequence; identical to SEQ ID NO: 176
  Synthetic polynucleotide

SEQ ID NO: 183 - DNA, 3632 bp, Artificial Sequence
  Synthetic polynucleotide
cttctcatccaatctaatagcaggatacgcgatgtttacattccgacaatagtggactcagtaccaacaccataaaaaaaaataaacaactagttatgtgtccataggggcaaaagaaaaagaaatacgcactactgtggaaagaagaaaaaaagcaataaggacttatttctatatccggaaaaagcatatatccttaaattggttaatgaacaaaaacttgaaacatgtctttccttcatgtttttgttgtaacttataacataacatgtaattgtttgtggttaccactgtttggaaaaagttgaagatttgtgagatctctcattgatgttacttttcctcttcaacttggcttctgtgtcactgtacatgtgatgcctttggcgtctctcttccttccaagtaagcagtccacatacgcattctcctcgtatcgtatgtcataagtcatgactgatcaacaatgctacgttgaccaagccaccacccacaaactcctttaaattctggcccaaacccttaagttcctgcattctccaatccatcactttctccttttcctcgtgttcacaaaatcacgctgcttaattattccttcaactaccatcatatcataccttctcaacagaaaaataaaaataaaaatgagatacatccttggagaacacaacattctgttcctcaaaagcttcgcccattcggcttaacttgtgtctttccagcatcccttcttcactgaaatcaattccccttgaagggcatttaaaatttgatcaagttagcctaagccatgcagcaagggactttggcaacaggtaccaatataatccaatggcagtgctgcaaccagaatcagtttctgatattgtagccaccataaggcatatctggctgatgggtcctggctcccacctcaccattgcagcgaggggccacggccactcgctgcagggtcaggctcaagcccatggaggacttgtgatcaacatggaatcactcaaggtcccagaaatgcaggtatatcgctaaatattaattgttaatcgttaattttttgttagctaggcaatcaaatccacaatcttttcctctcttccttcttcttatacaaccaaactaaccttataactccaatgcagatacatgttgatgagggaaacaagtctcctccatacgtggatgtctcaggtggcgagttgtggataaacatattgcatgagactctaagatacggcttggcgccaagatcgtggacagactacctgcatctcacagttggtggcactctctccaacgctggtgtcagtggtcagacatttaggcatggtccccagataagtaatgtacagcagctcgagattgttacaggtttgtgaaaaagagaatgaataataattgtttgtcttttctgaataataattcatttgatactggctgcatataagttttctaataaataatttttttcccctactttgatgagtaaaacatggtcaatgaatggatgcaggaacaggggaggtgttgaactgttccgcggagaataatggggatctctttcatggtgttctagggggcttggccaatttggcattataacccgggcaagaattgtcctagaaccagcacctaccatggtaatgcatcactcatcagtgactataccaaaacaagcttctttttttttggttttaatgtgtgctttgggtcatgactgaaaattttctatttattggaacaggtaaaatggattagagtgctgtactcagatttcacagcattcacaagagaccaagagaggttaatatctgcagaaaagacttttgactacattgaaggatttgtgataataaacagaactggtcttctaaataactggcgattatccttcaacccacgagacccggtccaagctagtcatttcaagtcggatggaagaactctcttctgccttgaaatggccaaatacttaaacgtggaagaaatcgatgcagcaaatcaggtgaggccagcaacactcaatctaatagatttttttgaaaataaagggataattaactccaaggttttaaaatatgagaccgtgggttgcaacatcaaagttttctaactctttgcgacccgaattgagactatgtcgatagcatttgtctatgatttgcccgtgatatcaacaaacacgaccaaaccacatgcgactgcgacctatatttaaaaccttgattaactcattagtgataatctttctttaggaaagaaaataaaagaggctaaatcaaccgtatctcacttttgtgtgtgcaggaagttgaggaacatttgtcccgtttaagctacatcccatcaactcttttttcaacagaagtcacatttgtagatttcttagacagggtgcacatatccgaggtcaagttgcgttcaaaaggcttgtgggatgttccacatccatggctcaatcttctaatacccaaaagccaaatactcaactttgcacaagtcgtcttcgggaacatcctatcagaaactagcaacggccccgtccttatctacccagtaaacaaatcaaagtaatgaatggttcagaaaaaaacatactattaactctagaaacaaatattttagccgtcaatattttttaattgacatgttttgttttgtttgcaggtgggacaacagaacttctgttgtgattccagaggaagatattttctacttagtggcatttcttacatctgcagttccatcttcaaatggaactgatggcctagaacacatactaagtcagaacaaaagaatattagaattctgtgaaagagcacaacttggagtgaagcagtatttgccccactacaacacacagcaagaatggagggcccattttggtcctcaatgggagacttttctgctgagaaagtccgtttatgatccattagcaatactcgcccctggccaacgtatatttcaaaaagcaataaccttctcatgaccacatttttattattaattattaaaaatctgaaaaaaaaaaagagaagaaaagtccttcatggcatgtgccaaaatgaaaaaaaaatgttatatgatccagacaggttttgacattgaccatacagaatgcaattgcaaaggaagaaggttcattgatagtagagaaaaagagggagaaaaagagattacaaaatgatgactggtgagatttgtatgccttgcaggttaatgaggaaagttgtcagtgtatgtaggtatgtaccattactgatggaaaaattgccttacgtgctgagtgtagcaccaaggcagcagggtccggctgagattagatcaacaaaacacattaatcattgtagggtttccaaagaacttataaatattatcagcgctagagccaatgtatagtactatcaattttgtaaacactcccttatttgttctctgtctcacatgtatccaaattcattaagattataattaaatacagatatttatgcatccaccacaaaaagatatcaatacgttcgcaacaaatacagataagatgatatataatgctgagtaacaaatactactattctagaaaattgcggaaaatgatataaaaatgggtatgcctaccctgaaggatgatgaat

SEQ ID NO: 184 - DNA, 8274 bp, Artificial Sequence
  Synthetic polynucleotide
ctacttctagaatgacaactactcctatggcaatatcaattgttagcggtggttcccttaagttcgagactaagggcagtctccaaaaggaagaaaggaaataacaaacttaagcctgaatgttctacgttttatttagtgtctcttgatatttaaaggtctatcaaatatgtataataaccgcacttccactataataaccacactcccactacgataatcgctacaataaccaccacaataactacttctaggatgacaactacctctatataagtttccatgacagaacatcttcttcctaacaccttacctatcacaaatgcttctcctctcggtgtcagagagtactattgattccctaagttctgacggtgtctttttctaaccaaagatccacttttcgaaggtcccgagccaattcgatgagagctcggaggcatagaactcggtttagtcacttatgccatgcttcatttcgtcgcgcgtactttaccaatcaacacacgccatcgagattgatctgcaagtgcagattacgtaagcgagaaaggatttgcaatggaattcacaaatcgcacaatcagagaacaggataagtgtactgctaattatgagcgccagggagtgtagattcatgtcttaggttttaaaattagaacagaataaatatgaaaattgttttttactttctatattttatattttaatttttttttagtttttattattagtaatattgttaattataattaattataaaaattttaacaagtaatttattactaatttatcataagataatttataataaaaaaataattgataatttataattaatttataactaattatttttatattttgtttagtaaagactaaaaggtaattaaaatgtaaattatagagattaaaatatcatttttaaactataagaactaaaaaagaattaaaatacaaactataagacaaaaaagatcacttttaaactataggaactaaaaaaattacttttaaattatatggactaaaaaataccaatcgtaaaattataggaactaaataaataatataaccttaaattttttattttaagatcaattttttaaaaaattaatgttaatcatgatattttatttataaaatatcaaaactcattttgtaaaatggattttcatcaaaataaacgttcactttgctatggtaaatcttgttttgtagtattttggttgttctgacccaaatgacccaaatgcaggctagtggacaatgacattgattgttttgtatatgggttgggtgtcccttgtatcctattgatatattccttttgccttattaagaaaaattgcattagaaactactatatattaaatgctctaacaattaatgattaaattgacaccacatcctgtttgactctccacttttcttttattggtactctctattttagtctgctctttatatacatgttaacttaaagacagcaaatttaccaaagtaacttatcttctctcttgaaagaaaaatgccacagaggaatttagtactattttccacaactatggttgtgctattgctatctagcatagtgctcacacaagcacaaccacgatcatggtcagcattccaagcatccaaagaactagccacaaagcttagtcgtaaccctcaaacctttccacatgcctcaaccgatgggcacatagttcacaaaaccccagtggcaattttcaatccatcttctgttagtgacatcttggccttgatacatttctcaaactctcttcctaacccattccccatagcccctagagggaaagcacactctgttcatggacaagccatgacaaaagatggggtggtgttgaatatgactaacctcaatagcagttttcaaaatgggttaggggttttggtgtctgcttgtgatggaaaaggtccattgatttgttatgctgatgtaggtggtggccaaatgtggatcgatgtcttgcatgcatcccttgaacgtggactcacacctttgtctttgactgattatatgtatgccactgttgggggcacactatctaatgctggcatgggtggcatgtcctttcgatttggacctcagatctctaatgttcttgaattggatgttattacaggtatgactcactcaattttatcaattaattttcttccatactcatctacacgcttgttcgaagtgaaacatttaactgaattttttttatcttggatatcacaattgtgtaatttttcgtctagatttgtgattatgttaattcaatctgtatatcttaataattatattaaagtccctccctccttcaattatctgtcaaatatttaacgaaatatatttatgtgacatttgagaatgttgatgggtttatatgtgttattttagtcgattagattttacgtgtgaagttttagtgtctcccaaattcttattaacattgtgggaaaaaatgagaaaacaatcgcagaactggagtttgattccagattattattattatttagtaattttattattatctatatcataatagtatatttattaactcatttaatatcatatttattacatatatttagtgtaataatagtatatttattacattctttttacatacaaaaagtcagaaagacttaaaagcttctacaaaaagaaatacctgttatatcagctcttaaagaattacatatgaaatcctacgcatttattacacacacacaaatatatatatatatatatacttaaacagaaatatgaattgttattatatttataattagtatttatattaatagaacaatttatagtttatactatggaataaatttttaaatataaatttattatttatattgatatactcatttatagtttttactaagatataagtttataaatataaatttgcacctcttgtgattttgaactggttttttaataaataaaaaataaataaaaagattataaatataaattattattacattaacataataatttacatttattaatttaatactaaatatatatagtaaatgtatcattaaatgaatgtagtaaacatattattaattttcagaaaagttttaatactttttcaccctagaaatatacaaattttttttaattgatataatttttttttgtttatgattcttgtattaatatttaaaccttccgttggagattaacgggtaaaaaatacaaggtttaaacattatataagtaaagttttcttacaacgacaaaacaaaactaattaatatatttacagctaatgatgtttgtttaaaaagtgctaattatatttttttgttctagtcaatgttgtatagttacccaacatataatcagtgacggactttttagttgtggggaaatattcattatatatatatatatatatatgaatcggtgctgcatataatacaatatatacaattttacactgaaaactgtatattattaaaatttatcaggaattatgcttaaatatcttattgtatctatcttattaaagaaatctaattatatctataaaataaaggtttatttcgatcgttttgatatattgtaaatattattttttttgtttgtttttctcgtataaactttaatacatctatatatgtggcttttatatatagggaaaggagaccttgtgacttgctccaaggagcagaactcagaggcattttacgctgctcttggaggattaggtcaatttggggtgataacaagagcaagaatacctctaggacctgcacctactagggcaagtattagtttcccctttcatatagatttcgtaagggtgaaaataaaaataatattttataggactaaaattaaactaatttcatataaacctaaattaaaactcactcaaattatagatgtattaaaatcatatttaatctatatatatgccatttaattttaattgaaacatacatattatatatagatcattttttcctgtaaacttagtcttagacactatacaacttcaatactattaaaattgtaccaaaattaactatcttaaaactaaaaatgagaataagtcgggtaattgacataagtctatgagctcacttgtttaaagcttggtctcatctatctaataaaaaaagttaaacttaaactttttaaaaagtctatttatttatataatttagacttggacttgtgaaaaaacttattaaactgtatagaccggtctaattattcatttaaatatagtaaaacattaaaatatattatacttttattttaatatcttaatatgttaatatatttttatcataaataaaatgaatatttgaaataaatagatctttaaatatgtaataagctaaactatatcatatcttaatttttataacatgccatacctatatatttatataacgtctaacttgacctaacatattatcacccctacttaaaaattatttatctatttatttttaacaaagtttttttcatgtgggtgtttgcaggtaaaatggctccgcctgctatacaacaacttcactgcattttcaagagaccaagaacatttaatatcgttcagtgaaaggaatgacattgctacagcagattatgtagaaggcatgcttctattgaatcagccgccactggatcttctcttttatccagcttctgatcatcaaagggtaacttccttggtaactcaatatggcattatctacatcttggagcttgccaaatactattacaataactctcaggcacatgtcaatgaggtaacttgaaataaaagttgtttttagcatctagttagaaacttcttttatttttattcttatttttttatggacaacatatataatgaatttagtaaagaaatacagagatattctaattgttatatattcatcatacatcaaagatcaaattaatcctcctgattgaaaagaattttgttttcatgaatccaaaagaaacatgtctcaaactcactcaaattgtatggaacccatatattaattaatttatgtacaattcattgttttttactaaattgattatttttcttgtttcttaaataggaagttgcatatttgctgaaagggttaaactttgtacatacatttgtgttcgaaagagatgtgtcatacgaggagtttgtgaacagagtttatcctttggagcaaatgcttaggtcagaaggactttgggaagttcctcacccttggctgaacctctgggttccaagatctagaatctcagattttgatgaaggtgttttcaaggacattgttcttaagcaaaatattactggcggaagttttctagtctacccaacaaacagaagaaacaagtaaattgattagattatttatttttttgtgagtgtcaaattattatctagatcacccgtctcctttaatttacatatcctttctagtgtttccaatatataaaaaaatgacacctcactaaaaaaaataacaaataagagaatttattgttttttaaccacatttttttattgagagaaaacactccacaagaaaaataataataacaacaaaataatttatgtaatttttaaaagaaaaggtcacttaaatttttgcaactctaaaattagttattgaaaaaaaaaacctcaagtctcacatttactagaggaacctcctaagttttttctaaaatgaatatatttctaaaggatatgagacttaaagttttttcaatattaatttacaacattgtgctctgattcaaagtcaagcaatctcctagaataaaagagattgaaaatagcactaacactattggtggggtttgtggtttgtggtctgtggatttaaatttggcatgtggtatttaacagaacttcaacagaggtataaattataaaagatttttttttctgagaaaaagaaataaatggaggtatgttattaaaagagggagtatgaataacaactgtcctaataatactccattgggcctgacagtaggagttgggccataacaattagggacaaaaaataattttggttactaaatttagtcaataattccttttcttagtcacattagatgtttctgttccaatttatttgcttatgtaaatgacttaatttatacatatgtgaggattaaattgaatcaacattatgcttcacaggtgggatgataggatgacaccaattacacctgacgaagatgttttctacgttgtagattttttgcgtgttgctaaaacgtttgatgtggtggacaaactacaggttcaaaacaaacagatactgcggttttgtaatgatgctggtattaagatcacagagtatcttatcgggaacaaaactcatcaacaatgggtggaacactttggcccaaaatggaaactttttgcagatagaaaaactgaatttgatcccaaaaaaatattgtcacctggacatgggattttccagtaaataatgtgctaggtttcagtgaaatctctcattttggaaattcatgaaataaaaatgaaattctgtaccagaaaaaaaaaaaaaaacttgttgtgtaattctgtgccaaacatacattgaattggattgaagttattatgcaattttgtacgaaaaaaaacttatgtatttgattattttatgtttttttattaatgttgaatgttcaaatattctcatgactcacgaacaacggcagatctagaagaaaaaaatggtcgtaagatgtgttgatggtatttaaatgaatgcatgtctacttcaaaatttatttgatagactcatttcgtaaaaaaaaaaaatagaaataacctatttaacaatacttgtttggaaaataaatttaaaaataagaaatttggtcgtttttttatatagaaaatagcattgtttttatgatattttaatgcaattcacgattttatgttgttgggtttttaaataaataaaagttacataaaactttagttttaaattttctttgggactgtgaatggagttaaactctaaaaaagatctataattccaaagtcaggttaccatcaaatattgacatatagcaaaaaaaaaaactactcccttgggaaaattatataaaatattaccttgtcaagagacttgcatttatacaaatgatttatttagcaaaattgttgcatcatgatcaaataggacaaacgttgctaaatcaatgtcactaggcattggcacccttacaagttacaagatacctttaagaaatcgaaaactatttttttcaaaccctttgttttgtgaattaactctttatgagctattttatccctctcaatcggaatataaagagatttttccttacatgacactagtggtctgatcctaagtttgagcttgctcgatgataagcaatgattttaagttttgggtgagaatatataaaaacattggttggagcgttttttgtttttatttttaaagaaaataaaaaataagaatgaaaatatatttatttaaaatttagaaaatattttttctgaatatatttttgaaatagaccaaaaactgaaaataataaatcaacattttcagtcttgtttgaaaaggtgaaaacagcgtggtaccttagagtgctttcttcttaatacattttttttaatcttaaaaatttgaaaatgaaaataaaaaataaacgctcaaatcaagctccacctaaatttttctctattgcaaatgttgaaaaaaatggaaaagcaaaagatctcaaagtaaaataaatatattgtcttttgttacattttgtttcaatgattgtggggaataattgaggtaggataagtggtaggaaaaaatatcaagcaacggataatggtaattgttttatataaaggtttaaatatatttttagtcttttaatttaaaattattattattttttagtccttaaaaacaaatatgcaaattttagtaatctaaaattttaaaatctagttttagtcttgttttgttaactctataacagaggttgtctgtgtggaaaatgatgtgcaattttgtggcgatttctttagtgtgaaaattttgttttaaatttaaatcaaacaaaatgtctcgcaaggcaacaataacgttgttgctgctaacaatcttcgtgtggcaaaatcaacagtggagaaaacgactatcaacaatgttagagaagagttgacgaaggaaaatggggaaaataggacaaacccgaacaaaaaaaccacccttgacttg

SEQ ID NO: 185 - DNA, 8147 bp, Artificial Sequence
  Synthetic polynucleotide
ctacttctagaatgacaactactcctatggcaatatcaattgttagcggtggttcccttaagttcgagactaagggcagtctccaaaaggaagaaaggaaataacaaacttaagcctgaatgttctacgttttatttagtgtctcttgatatttaaaggtctatcaaatatgtataataaccgcacttccactataataaccacactcccactacgataatcgctacaataaccaccacaataactacttctaggatgacaactacctctatataagtttccatgacagaacatcttcttcctaacaccttacctatcacaaatgcttctcctctcggtgtcagagagtactattgattccctaagttctgacggtgtctttttctaaccaaagatccacttttcgaaggtcccgagccaattcgatgagagctcggaggcatagaactcggtttagtcacttatgccatgcttcatttcgtcgcgcgtactttaccaatcaacacacgccatcgagattgatctgcaagtgcagattacgtaagcgagaaaggatttgcaatggaattcacaaatcgcacaatcagagaacaggataagtgtactgctaattatgagcgccagggagtgtagattcatgtcttaggttttaaaattagaacagaataaatatgaaaattgttttttactttctatattttatattttaatttttttttagtttttattattagtaatattgttaattataattaattataaaaattttaacaagtaatttattactaatttatcataagataatttataataaaaaaataattgataatttataattaatttataactaattatttttatattttgtttagtaaagactaaaaggtaattaaaatgtaaattatagagattaaaatatcatttttaaactataagaactaaaaaagaattaaaatacaaactataagacaaaaaagatcacttttaaactataggaactaaaaaaattacttttaaattatatggactaaaaaataccaatcgtaaaattataggaactaaataaataatataaccttaaattttttattttaagatcaattttttaaaaaattaatgttaatcatgatattttatttataaaatatcaaaactcattttgtaaaatggattttcatcaaaataaacgttcactttgctatggtaaatcttgttttgtagtattttggttgttctgacccaaatgacccaaatgcaggctagtggacaatgacattgattgttttgtatatgggttgggtgtcccttgtatcctattgatatattccttttgccttattaagaaaaattgcattagaaactactatatattaaatgctctaacaattaatgattaaattgacaccacatcctgtttgactctccacttttcttttattggtactctctattttagtctgctctttatatacatgttaacttaaagacagcaaatttaccaaagtaacttatcttctctcttgaaagaaaaatgccacagaggaatttagtactattttccacaactatggttgtgctcacatagttcacaaaaccccagtggcaattttcaatccatcttctgttagtgacatcttggccttgatacatttctcaaactctcttcctaacccattccccatagcccctagagggaaagcacactctgttcatggacaagccatgacaaaagatggggtggtgttgaatatgactaacctcaatagcagttttcaaaatgggttaggggttttggtgtctgcttgtgatggaaaaggtccattgatttgttatgctgatgtaggtggtggccaaatgtggatcgatgtcttgcatgcatcccttgaacgtggactcacacctttgtctttgactgattatatgtatgccactgttgggggcacactatctaatgctggcatgggtggcatgtcctttcgatttggacctcagatctctaatgttcttgaattggatgttattacaggtatgactcactcaattttatcaattaattttcttccatactcatctacacgcttgttcgaagtgaaacatttaactgaattttttttatcttggatatcacaattgtgtaatttttcgtctagatttgtgattatgttaattcaatctgtatatcttaataattatattaaagtccctccctccttcaattatctgtcaaatatttaacgaaatatatttatgtgacatttgagaatgttgatgggtttatatgtgttattttagtcgattagattttacgtgtgaagttttagtgtctcccaaattcttattaacattgtgggaaaaaatgagaaaacaatcgcagaactggagtttgattccagattattattattatttagtaattttattattatctatatcataatagtatatttattaactcatttaatatcatatttattacatatatttagtgtaataatagtatatttattacattctttttacatacaaaaagtcagaaagacttaaaagcttctacaaaaagaaatacctgttatatcagctcttaaagaattacatatgaaatcctacgcatttattacacacacacaaatatatatatatatatatacttaaacagaaatatgaattgttattatatttataattagtatttatattaatagaacaatttatagtttatactatggaataaatttttaaatataaatttattatttatattgatatactcatttatagtttttactaagatataagtttataaatataaatttgcacctcttgtgattttgaactggttttttaataaataaaaaataaataaaaagattataaatataaattattattacattaacataataatttacatttattaatttaatactaaatatatatagtaaatgtatcattaaatgaatgtagtaaacatattattaattttcagaaaagttttaatactttttcaccctagaaatatacaaattttttttaattgatataatttttttttgtttatgattcttgtattaatatttaaaccttccgttggagattaacgggtaaaaaatacaaggtttaaacattatataagtaaagttttcttacaacgacaaaacaaaactaattaatatatttacagctaatgatgtttgtttaaaaagtgctaattatatttttttgttctagtcaatgttgtatagttacccaacatataatcagtgacggactttttagttgtggggaaatattcattatatatatatatatatatatgaatcggtgctgcatataatacaatatatacaattttacactgaaaactgtatattattaaaatttatcaggaattatgcttaaatatcttattgtatctatcttattaaagaaatctaattatatctataaaataaaggtttatttcgatcgttttgatatattgtaaatattattttttttgtttgtttttctcgtataaactttaatacatctatatatgtggcttttatatatagggaaaggagaccttgtgacttgctccaaggagcagaactcagaggcattttacgctgctcttggaggattaggtcaatttggggtgataacaagagcaagaatacctctaggacctgcacctactagggcaagtattagtttcccctttcatatagatttcgtaagggtgaaaataaaaataatattttataggactaaaattaaactaatttcatataaacctaaattaaaactcactcaaattatagatgtattaaaatcatatttaatctatatatatgccatttaattttaattgaaacatacatattatatatagatcattttttcctgtaaacttagtcttagacactatacaacttcaatactattaaaattgtaccaaaattaactatcttaaaactaaaaatgagaataagtcgggtaattgacataagtctatgagctcacttgtttaaagcttggtctcatctatctaataaaaaaagttaaacttaaactttttaaaaagtctatttatttatataatttagacttggacttgtgaaaaaacttattaaactgtatagaccggtctaattattcatttaaatatagtaaaacattaaaatatattatacttttattttaatatcttaatatgttaatatatttttatcataaataaaatgaatatttgaaataaatagatctttaaatatgtaataagctaaactatatcatatcttaatttttataacatgccatacctatatatttatataacgtctaacttgacctaacatattatcacccctacttaaaaattatttatctatttatttttaacaaagtttttttcatgtgggtgtttgcaggtaaaatggctccgcctgctatacaacaacttcactgcattttcaagagaccaagaacatttaatatcgttcagtgaaaggaatgacattgctacagcagattatgtagaaggcatgcttctattgaatcagccgccactggatcttctcttttatccagcttctgatcatcaaagggtaacttccttggtaactcaatatggcattatctacatcttggagcttgccaaatactattacaataactctcaggcacatgtcaatgaggtaacttgaaataaaagttgtttttagcatctagttagaaacttcttttatttttattcttatttttttatggacaacatatataatgaatttagtaaagaaatacagagatattctaattgttatatattcatcatacatcaaagatcaaattaatcctcctgattgaaaagaattttgttttcatgaatccaaaagaaacatgtctcaaactcactcaaattgtatggaacccatatattaattaatttatgtacaattcattgttttttactaaattgattatttttcttgtttcttaaataggaagttgcatatttgctgaaagggttaaactttgtacatacatttgtgttcgaaagagatgtgtcatacgaggagtttgtgaacagagtttatcctttggagcaaatgcttaggtcagaaggactttgggaagttcctcacccttggctgaacctctgggttccaagatctagaatctcagattttgatgaaggtgttttcaaggacattgttcttaagcaaaatattactggcggaagttttctagtctacccaacaaacagaagaaacaagtaaattgattagattatttatttttttgtgagtgtcaaattattatctagatcacccgtctcctttaatttacatatcctttctagtgtttccaatatataaaaaaatgacacctcactaaaaaaaataacaaataagagaatttattgttttttaaccacatttttttattgagagaaaacactccacaagaaaaataataataacaacaaaataatttatgtaatttttaaaagaaaaggtcacttaaatttttgcaactctaaaattagttattgaaaaaaaaaacctcaagtctcacatttactagaggaacctcctaagttttttctaaaatgaatatatttctaaaggatatgagacttaaagttttttcaatattaatttacaacattgtgctctgattcaaagtcaagcaatctcctagaataaaagagattgaaaatagcactaacactattggtggggtttgtggtttgtggtctgtggatttaaatttggcatgtggtatttaacagaacttcaacagaggtataaattataaaagatttttttttctgagaaaaagaaataaatggaggtatgttattaaaagagggagtatgaataacaactgtcctaataatactccattgggcctgacagtaggagttgggccataacaattagggacaaaaaataattttggttactaaatttagtcaataattccttttcttagtcacattagatgtttctgttccaatttatttgcttatgtaaatgacttaatttatacatatgtgaggattaaattgaatcaacattatgcttcacaggtgggatgataggatgacaccaattacacctgacgaagatgttttctacgttgtagattttttgcgtgttgctaaaacgtttgatgtggtggacaaactacaggttcaaaacaaacagatactgcggttttgtaatgatgctggtattaagatcacagagtatcttatcgggaacaaaactcatcaacaatgggtggaacactttggcccaaaatggaaactttttgcagatagaaaaactgaatttgatcccaaaaaaatattgtcacctggacatgggattttccagtaaataatgtgctaggtttcagtgaaatctctcattttggaaattcatgaaataaaaatgaaattctgtaccagaaaaaaaaaaaaaaacttgttgtgtaattctgtgccaaacatacattgaattggattgaagttattatgcaattttgtacgaaaaaaaacttatgtatttgattattttatgtttttttattaatgttgaatgttcaaatattctcatgactcacgaacaacggcagatctagaagaaaaaaatggtcgtaagatgtgttgatggtatttaaatgaatgcatgtctacttcaaaatttatttgatagactcatttcgtaaaaaaaaaaaatagaaataacctatttaacaatacttgtttggaaaataaatttaaaaataagaaatttggtcgtttttttatatagaaaatagcattgtttttatgatattttaatgcaattcacgattttatgttgttgggtttttaaataaataaaagttacataaaactttagttttaaattttctttgggactgtgaatggagttaaactctaaaaaagatctataattccaaagtcaggttaccatcaaatattgacatatagcaaaaaaaaaaactactcccttgggaaaattatataaaatattaccttgtcaagagacttgcatttatacaaatgatttatttagcaaaattgttgcatcatgatcaaataggacaaacgttgctaaatcaatgtcactaggcattggcacccttacaagttacaagatacctttaagaaatcgaaaactatttttttcaaaccctttgttttgtgaattaactctttatgagctattttatccctctcaatcggaatataaagagatttttccttacatgacactagtggtctgatcctaagtttgagcttgctcgatgataagcaatgattttaagttttgggtgagaatatataaaaacattggttggagcgttttttgtttttatttttaaagaaaataaaaaataagaatgaaaatatatttatttaaaatttagaaaatattttttctgaatatatttttgaaatagaccaaaaactgaaaataataaatcaacattttcagtcttgtttgaaaaggtgaaaacagcgtggtaccttagagtgctttcttcttaatacattttttttaatcttaaaaatttgaaaatgaaaataaaaaataaacgctcaaatcaagctccacctaaatttttctctattgcaaatgttgaaaaaaatggaaaagcaaaagatctcaaagtaaaataaatatattgtcttttgttacattttgtttcaatgattgtggggaataattgaggtaggataagtggtaggaaaaaatatcaagcaacggataatggtaattgttttatataaaggtttaaatatatttttagtcttttaatttaaaattattattattttttagtccttaaaaacaaatatgcaaattttagtaatctaaaattttaaaatctagttttagtcttgttttgttaactctataacagaggttgtctgtgtggaaaatgatgtgcaattttgtggcgatttctttagtgtgaaaattttgttttaaatttaaatcaaacaaaatgtctcgcaaggcaacaataacgttgttgctgctaacaatcttcgtgtggcaaaatcaacagtggagaaaacgactatcaacaatgttagagaagagttgacgaaggaaaatggggaaaataggacaaacccgaacaaaaaaaccacccttgacttg

SEQ ID NO: 186 - DNA, 5760 bp, Artificial Sequence; identical to SEQ ID NO: 120
  Synthetic polynucleotide

SEQ ID NO: 187 - DNA, 5752 bp, Artificial Sequence
  Synthetic polynucleotide
ataaatggtagaaatctgtgggttcaaatgttcaattgctggggatcttcgtgatcatgatgattcatacacaatctctagaaacacgtacgcaaatattaattaatcaatttcctttttatagtctcctcacaattcacatgaaacttcatactctattatccgattccatttccatcgtatctttgaatttgacatttgtttgcccaacatgtaattaactttcccttctcatcttaaagatgtaacatgatatatattataacttgtaattaacccaatatttttaactctctatttttacactcatctgacatgtatttttatttttcatttttttttcttatcacatcacctcttacgtgtacaatttttctctttttcttatttctgtcttccataatagtaattaatattcatcggtccgatatgtatacagcccaaaaaagtgtgtaaaatcatttttgtatttctaaccctctctttctcatgcaagctagcttcttctttctatttatagcccttctcccttcacccaccaacacaccacaactccaaactttttcctcttgttctcttcttcttcaacacaactagtcataatccagctcatctctctctccctctctctttgttctctctttctctttctccaaaatggctctaaactacccttttttaacctacttcatactactgctagtaaattcactgtgggaaaaactgagcaatggaaagctccgattctaccagagcttgacattgataacatatcccacaaactccatgatgaccctgaaaccattcaaatggcttcaagggactatggccatttaacgcatgaattcccattagctgtgtttcgtccatcttctatagatgacatagtcaccttgataaaatcttcgtacaatagctttgccccttttgacatagctgcgaggggccaaggccactccactcatggacaagccatggctcgtgatgggattgtggtggacatggccagcctaagaaaacaaagaaatggggttgcgattagtgtctctaaggaccctttgatgggtcactatgctgatgttggaggggaacaactctggattgatgtgctacatgccacacttgaatatggacttgcaccagtttcttggactgattatttgtacttgaccgtgggagggacactttctaatgctggaatcagtggccagagcttccgttatggacctcaaatcagcaacgttcatgaaatggatgtcatcactggtatggagttagttgttttttttaatcaataaatgttaatattattagcttgttagttttttttgaaaaaattgaattaactttcgtttcctcttttctttctttttttaaccacacaattaatctaataactactggtattaagttagtttattttccatttttcatatataagttaggatttctaattaaaattgacatttcgtaccaccactacaaaaaaataatgtatcagtggcacaaaaaaatatattggcatcacttgtttttttagtcattaatattttgtagcatcacaaaaaatatggtgacaagttttctaaaaattacaaattaactgattcgtcagtgatgttaatgattttttagtgcgtcttggcaactaatgttttcatcttatataaaattagaaacaatagcggcaacagcacctgacattgtgtttgtgttttgcgtgtttctatcgcctaatttttgttgagaacgtgttcgtgaaacttggaaaaagagaaaattgaaattttcttgagatatctaccacttaagaaaaacaaatggctgtttccgttttgtctcttatgacatgacatggtacgtcatagatgaagttctgctaaatatatttgatatgatttcttgaacacgttttatatattcccacttcccagttagtgtggttgttgaatctaattaaaacaggaatagtctttgtctacaatatgggtgagcgatgcaaactttccaagggtttagaagttagaactatataggtccacggtcataattttatattcttgattaactttatgttggttaagtcgttcatatttggtcaattcattcatatgagaaaatactgaaatacaaacatggaaaaatgttaattactcttataattggcgcatgcatgcatctaaattatatgattttaataaatagtttttgtcatctacttgatttcaggaaaaggagagttcgtaacatgctcttcacagaagaacttggagttattccacgcggttcttggaggcttgggacaatttggagttatagcaagggcgagaattgctcttgagccagcacccaaaagggtacgtttatagagaattgactagaattttgtcttgtagcttttcctccaccaattcatatagtgacacctaatcgaattgtcatttttttttacggtgaattgtcattttgtaaatctaccaagtggtagttggcacccatatatgtatgaactatagtaccatacatttcattttatgttggtgtgttagtcatccatgatgaacacatacacaaatgaaaataggacgagttatacgtacgtaagggtttgaatcactgaatgtggatttttgaagttgaaagcatattaatcttggtttgaaaaagaaaaaaaaaatcggaagtccctcttgaagttatcatgactcttatattaagccaatagaattagaaaaactataattatgaatgatcatgttaattctttcagtgacttaaaatcttatctacaaaaagtacccttttgaaaaagaccttcacttaagtccatgcatacagtactaatcttacatacttgagagttgagacttgaagcatgaggagatttgaagtctggagaaacaagccaccacatattaattactaccgtattcttatctttatttatccttccaattttgatgggactggttgcacatacattcatacatactaacatacataaatacgtctctctctcatgtatttcattttattatattctatttcgttagtaagtttactagtataagacattattaatggtgaatttttgttggcatgcaggttaagtgggtcagactactttatagtgacttttctgcttttaccaaagaccaggaacgattaatctcaatcaatggaaggaaacaaaagaacgcattggattttctggaagggatgctgctaatgaaccaaggccccataaataattggagatcctctttcttccctctatctgaccatcccagaatagcttctttaataactgaacatagcatcctctactgtcttgaagtggctaaatattatgacgaacaaaccgagttaaatgtggacaaggtaacctcgtctagtcatatctattatatatagttagatcttgtcacatttctttgtttaaaaaataaaataaaaggcacaatcccaaaaagtcaaaagcaaatgcctagatattgtgtgttttcttggatattaattattacaccttaataacccataataatttttttatttttctttgtctctgtaggaaattgaagttttgctccaaggactagcctatatccctggatttaattatgagaaaaatgtctcgtacgttgagttcttgaatagggtccgaagtggagagttgaaacttcagtcacaaggactgtgggaagttcctcacccgtggcttaatttgtttataccaaaatctcaaatcttggattttaattcaggagtattcaaagatatagttcttaaaagaaacatctcctctggaccagtcttggtttatcccatgaatagaaacaagtaagccttgaatgcatgaatcacaatctagtgtcattataattcaggagtgtgtgatgcaatcttttaattttctgaccattcaactcaatatcaattttatttcttttttcaattaaaatgcaaaagagaataataattaataatatgaaatttaattccaggtgggacgataggatgtcagcatctataccagacgaggatgttttctacacagttgggtttttgcactcaagtgggtttgatacttggaaggcatatgatgctcaaaacagagaaattttggagttctgtagagatgctggcatcatggtcaagcaatatcttcccaaccacagcacacaagaagattggacaaaccattttggtgctaaatggatgaaattcttagaaagaaaacatcagtttgatccaagaatgattctatcacctgggcaaaaaatcttccacaaaaaattacagccagtgttttaaatattttccctaataaaaaaagtaaaaatgttttgtggtgggactacctcaattagatggctagctagggacaggtgtacatacagtgtgaccaagaccaagatggcttttgtatgctaaagtttgcattgctagctagagaaattaataaggtggggcattaaaggctgcatgagtacttttggcacctattatgctacatattaccttagatacgttaggttgacaaagtcgtactggtaggtacaagaagcacagttgtctctcacactgtctgtcacccaacttgctatatagtgtgtggagaaattcggatcatattgaagatgctgtgagttatagtcctccaatattaaatgtttaacgattctgtctttctcttatataattttgttttgcattatattactttcgcactggtgcaaacatatatatcaatgattataattaatttatacaatgacgagtataattgtacccaagttgcatgccataatatttgtcaaaaacaaaaagttgtatgccataatcaatccaggttgctagataataagatagatatgaatatgataacataaaatgctattaaagcaacaaataaacaataacacatagtccttatagggttcataattgatcgatgaacctagctagacgttgattttaggttaatttccagcgaggataaaatttattatataaagaaataactaaccaacacaaaataataaaaaattaaaaaaaaacgaagaaacttattttagagatataatttgttttagtatttgattgtaatttgagagattagctaggctctcaccaagtgagatctagagtatattcttaagaaaatatttataataaagaacccttaaacattttgcaaaacaaagggtggaattaatattaacaacaataattataatatcttgaaaattttatgaaaataatatatatatatatatatatatagagagagagagagagagagagagaaaattctcacaaacaatttttatctgttatttcaaattggtgtatgactccttagtccttagttcatttgtttgcacccagtcctgtcttaggtagttgattttatagttaggtaaattaatttctcgcactcttcgcttgattgtcatttatgggttgaactgttgaagtgattttatattttttaataaatttcacctgcaaaaaaactcaccattagcatacgccccccccccccccccccccccctctcccaaaaaaaaaaaaaaaacgaaagaagattaattagaaagaataaggtcgtgaaatgatgttacaaataaggcatatcagaatcagacgcaagggaagaataaaaacgttacaacaattcgcgcacaatgcaccccaaaaaaaaaatgacaggcacacataccttaaggaagaagaatcaacgctttca

SEQ ID NO: 188 - DNA, 7383 bp, Artificial Sequence
  Synthetic polynucleotide
ttaaatcggttcaaaattgttgaatcgatccaaaactagtaaatacagtaggttaattgatttcacttgaaatttaaaaaaaaaaaattaaaatgacgtcattttagtttttttttaaattattataacttatatgacatttttaagtgaagtttactttttattattattaatttatgcatactaggtttctgaaatattatattaaaatattatatatatatatatatatatatatatatatatatatatatatatatatatatatatatatatattattaaaatcaattccacttcgattgagctattaacttttgaaccaatatcttccccagttcaatgaccatccaagtctgaaaacattggttaccatcaacgttacccttccgtgaattggaaaagttaatgcaatataggttgatccaaggataagtcctatggtcccagaaagaaaatcttgagagatccttttgataattacccgagtttttactctctccttttaattcacgaaattggaaacttcaattgctaatataaaaagaattttgttagccaatatcatcagggtattgtcaaagaattacaagaaaaaaaaattataagataacataaaaaaataaaaaacaacataattttatatattttaataaaaaattcttttaatttttttttatcaatattctatagttactggcatttgacatgtaaaaatgtaaacatatgaattgataaaatttgaccaatgtttgaccctgagataggaatccaacggccccagttcaattgcaatcttttatttttactacgtgaaggcccaacaatggagaaccttgtggattttattgctgagaatctgtggttacgatgatgacacaccaacacaatcacagaaagcaagtaccgtttggaaggcctaacacttcattaattgcttcattaaatttattttactttctagctgctcaatttaattgctttacacaaatacttcatgacgtttcagaaggagggccaaatacaatctctacaatggttccatcgtatctttgaatttgacatttagcatccctccctttgcacaatgtacaatttgcattttgaatatttttttctcaccttcatatcgtgggactacttctataaccatcctggtgaaaataaataaagcgagggaattacgtaattaaacatatttaaatttctctctcctctgtttaattaatttatcaaaaacaaatatgtgtgcgagtatttaaaaatgtgtaaagtattattattttttaatttttcttttttccttctcatcaatgataaatatactttttaatataaaaatcaaacaataactataaaaaaaacatcttcacttcaattcaacattaaataaaaaataatccctgctttgttattttttacccaccaattatcatatttgttatttattatttttttatgttcttgctataaaggaaatcactatttgactcacacaaaactataaaggaatcaaataatcaattattatttaaaaactctattaaaataacaattacaacaaaatcccttatttttttcttccttatcattattaaaccttcccattctctctttctatctctacatgtttttctcaaattaaatattttctatatcctcctttatcatgcaaattaaagtcctcttccattctatatatagccgctacctcctccacctcctttccccactacaacacacaaacaccaacaaccaaatcaatccatccaccctagaaacaacaaagcactctctcttctctcattctattatcttctctcatcctcttattctctccaaaccaacaaaaaaaaaatggttgctgagaactacccttctcccacatacttcatcctcataaccataacacgtttgatctccacagtgggcaaaacctcccaatggacgaaggccctgtcgctgcctccggaactcgcctccgtctccctcgacgacaccatcttctgcaagctccgtgacgacccagaggaagggcctccagggactacgggaacctcgtccgcgaggttcccttggcagtcttccacccagcctcagcgagcgacatcgcgaggctgatcaagctgtcgtacaacggctctgtccccttcaagattgcggcgagggggcaagggcactcgacaaggggccaggcgatggcacgtgagggggtggtggtggacatggcggggttcagagagagagggaatggagtggggataagggttgtgagtagtgtggaccctaataataagaatggttactactattatgcggatgttggaggggaacagttgtggatcgatgtgctacacgccacgctcgagcatggacttgcacctatgtcctggactgattacttgtacttgacgctgggagggactctctccaatgctggcatcagtggccagacattccgctatggtcctcaaatcaccactgtccgggaaatggacgtaatcaccggtaagaaaactttccattcaaccagttaacttacatgtttttagttttttagcttccaatatccaatagtttataacttgtaagcttcaattttatgttaatttataagctagttttaccctacttttgaaaattcaaggattttggtactacaataactcccttgtcaaactcgttcaattgttggcttagtatcaagtagactcttggatttttaggtgtactttaacaaccatgttaatttaattgatcagggttttaatattatggaaattggccattggacaacttggaatggaaggaaagcgggagatggaaagggaaaagaaattaattagaataattgttaatattagttgcgtgaaaaaaattaaatttgctgaattaaattatggttcatcacgactctatttgtggcaacaccaacgtgccgttttcagaacttcattgcaacagcggttatagtggcgtttattcaattcatattttaatgcatcagactgtgattgcgattgaaattttatgaaatcttgttttataaacttgttcttttgattaggaaacttgattctattttatatatatttaatgtaacgccgaattaatggttgataaacgagtctttgtctaaaattttggcgaatgttagcaagcgttttccacgtggtcccgtacgtgtttgaaaaattcttaatcatggaatcagttcacacgggcagtcatagactcatagactccaattcttgattaattgttttcttattaatattggtccatggtcttattttggtcaattctttttattaaaaataaacgggctgctgaattttaatttactcaagtgtttgttaatgaatatgtgtgcatgcatgcaattatatatatatatatatattactattatttatttgtgttttaatcaaattttggtttggttcaggaaagggagaatttgtgacttgctctcagcagacgaattcggagttgtttcacgcggttcttggaggcttaggacaatttggaattataacaagggcaagaattgctcttgcgccagctccgaagagggtacgtttaaaatcttcggaattgactaggacttgtcttgttgcttcttcctccaacatctctcatatagtaacgcaaatttctaaatatgttacattattaattcaaccaccaagctttgcggaagcatcaaatgtcgttgtcctgaaagcttcatgtcatcatttttcttggcacccatatacacacacatacgtttcacattgtgtcagtgcatattagtcatccatgaaagacacatgtacaaatgaaaacgagaggagttatattaaaatgtgtgttggaaaaatatatatcatattttcataagtcttaattttgaaattaatatacagtaaccctttgagaccttagcaattaagccaataaaaaggctcgtattaaccccaaccaacaactattagaaaatactaacaagtataggtgtatacataaatgattcatttgaattttagtaccttaattatttaactttatccttctatttgacgggactcgttgcataagccatacatacataatcatgcgttcattattgtttttcattatgagttaatgagttgattgtatgaactaatggtgaatttttgttggcaggttaaatgggtgagacttttgtacaatgacttttctgcttttaccaaagaccaggaacaactaatatctatcactggaaggaaacaaaatgtttcactggattatttggaaggattgctgctaatgcaccaaggacccataaataattggagatcttctttcttccctttagccgaccatgcccgaataatttcgctagtaactaaacacagcgtcctctattgcctagaagttgccaaatattatgatggccaaaatgaaaacaatgtggacaaggtaccatctccattcatgtgcatttgccttgatgatgtttcttctattttttcttttaatgttttgatctcaccttatataataaccctttatcacactcaatcttgttatatttttaagagtttaatgataatattatgattttgttgtgaaaaaagagagtttaattgttattatataatcacaaattatcattaatatgacttttaaaataattaataatataaaaattaataaatttatcgtatttaatgagttataattaaatgatcatataaaattattttatattattaacatatagtttttttttctatttttaatatttgttttactataagttgttatattttcaatcttttttctagtataagttttaataatcaatattgtaagtaatattctcatttttcatgttgtgtaggaactccaagttttactacaaggattgagctatatccctggattttactatgaaaaagatgtctcatattttgagttcttgaatagagtccgaagtggagagttgaagctacagtcacaaggactatgggatgttcctcacccgtggcttaatttgtttataccgaaatctcaaatcatggaatttgactcgggcgtgttcaagaatatcatccttaaacgaaacatcaccacaggacctgtcttggtttaccccatgaatagaaacaagtaattgagcttaactaactaatctcaacttatgttgttatcattaggaaaaatgttaattggtacgaaaactatatataccactattttcatttaaattcatgaaagtgaaatttctctttcctaaaacaaattctttctcttaaaatgaatttttgtttttctcaatctccatcaattacttatttccttttttgaatgtttgaaaagtcattcacaacattttcttcataaaagggttattcgtaccaatttaaatagaattgccgttattatcagatgtacaattcttctcttcactcacttcttttccattaaaattgtaaaaaaaaaataaaaaaatcaggtgggacaataggatgtcagcatcaatacccgatgaggatatcttctacacagttggatttttgcattcaagtgggtttgataattggaaggcctatgatgctcaaaataaagaaattctacaattttgtaacgttgctgggatcaaggttaagcaatatcttccccactatcgcacacaagaagattgggcaaaccattttggccctaaatggaggacttttgtagaaagaaaacaccagtttgatccaagaatgattctatcacctggacaaagaatctttaacaattaaaatagctttaaaaatatatattcccccccccccccccccccccaaaaaaaaaaaaattatataatatggtgggactacccaagttagctagctggctgatcacaagtgtgcacataggacccagaattcagatgatagcctttgtacttgtttttgttaagagggtggggttaaaagctgcatgactttggcatatatgtagatcaggttacacatactttagatacgttaggttgacaaaatcatgtgtgaaataagatgcacacagctagctgtgtacctttctttctctctgtccctcaatttgtctatcactaaaaagatttctatatagtttagaacctagtgaagagaaagaaaaaaccattatattgaggatttaattttatcacgttctaatcctatacattaatattcttaaatgtgcaatgagtgtgctcggtgccttaatgattctttatctttgttaattgttatattgtagggttttgtttttgccttcctaattttgtaacaggggcacccctagcaataattgagatcctaggttaactaaggaacagcattattgtgtctaaattgagattcctagctgtatgccataataataaatcatcgtaggttgctagatagatgtgatagcgccaaatgccttccaatactataatctccattgcaagatccttcgttgtgattgtgtagaaaagattacgctgctttacaagagaatactccaagaaagcaagtgattgctccttaatataaagaatcatgcaataaacaaatggtgtcgtaatccataaagtgtatttaatatttgatgaaagagtagtgtagacatcaaacaaaataaagtttgatgcaattcgaattatagatacttgattaatctctaaattatgttgagacaatcatatttgaatttgataagactattatgaacgataaaaaatattataaataataaaaaaatttcatcaaacatttaatacaattatataccttactcaaatttgaaaacctgtacatataggaaaaaaacctttactaaaagaggttaaactcaccatacggatttttatatgtcgaagggatctttaattgtccatcggaaaacatcctaattcataaaaaaggaaagaaagtttagacatgaataattacggaccaatgaatgcaacctacgtctctcaattttaaggagaatttaggaatattatagtatatcactgaaagtacacacaagtggcaatgatgaatattttaatttaaagttttaattggattcgaaattaatcccttcttttttccagaaaaaataataatcatcgagtaatcaagacaatttcccaagtagacaacaagaatacaaaagagaatacgtgacttcgtttcaccatagaaaagaaggaatgcaataacgatgataataattataaaatgaaattgacaaaatatctaaatgcctgtagatatttctacagcgaatgataagtgtttttccattaaaaataagtttcttttgttaagaatttctaacatttttagttccaaaatataggaatgaagccaataagtaagtaagaatttctaacgtctgaaag

SEQ ID NO: 189 - DNA, 3650 bp, Artificial Sequence
  Synthetic polynucleotide
cttctcatccaatctaatagcaggatacgcgatgtttacattccgacaatagtggactcagtaccaacaccataaaaaaaaataaacaactagttatgtgtccataggggcaaaagaaaaagaaatacgcactactgtggaaagaagaaaaaaagcaataaggacttatttctatatccggaaaaagcatatatccttaaattggttaatgaacaaaaacttgaaacatgtctttccttcatgtttttgttgtaacttataacataacatgtaattgtttgtggttaccactgtttggaaaaagttgaagatttgtgagatctctcattgatgttacttttcctcttcaacttggcttctgtgtcactgtacatgtgatgcctttggcgtctctcttccttccaagtaagcagtccacatacgcattctcctcgtatcgtatgtcataagtcatgactgatcaacaatgctacgttgaccaagccaccacccacaaactcctttaaattctggcccaaacccttaagttcctgcattctccaatccatcactttctccttttcctcgtgttcacaaaatcacgctgcttaattattccttcaactaccatcatatcataccttctcaacagaaaaataaaaataaaaatgagatacatccttggagaacacaacattctgttcctcaaaagcttcgcctttccttagttgcatagccattcggcttaacttgtgtctttccagcatcccttcttcactgaaatcaattccccttgaagggcatttaaaatttgatcaagttagcctaagccatgcagcaagggactttggcaacaggtaccaatataatccaatggcagtgctgcaaccagaatcagtttctgatattgtagccaccataaggcatatctggctgatgggtcctggctcccacctcaccattgcagcgaggggccacggccactcgctgcagggtcaggctcaagcccatggaggacttgtgatcaacatggaatcactcaaggtcccagaaatgcaggtatatcgctaaatattaattgttaatcgttaattttttgttagctaggcaatcaaatccacaatcttttcctctcttccttcttcttatacaaccaaactaaccttataactccaatgcagatacatgttgatgagggaaacaagtctcctccatacgtggatgtctcaggtggcgagttgtggataaacatattgcatgagactctaagatacggcttggcgccaagatcgtggacagactacctgcatctcacagttggtggcactctctccaacgctggtgtcagtggtcagacatttaggcatggtccccagataagtaatgtacagcagctcgagattgttacaggtttgtgaaaaagagaatgaataataattgtttgtcttttctgaataataattcatttgatactggctgcatataagttttctaataaataatttttttcccctactttgatgagtaaaacatggtcaatgaatggatgcaggaacaggggaggtgttgaactgttccgcggagaataatggggatctctttcatggtgttctagggggcttggccaatttggcattataacccgggcaagaattgtcctagaaccagcacctaccatggtaatgcatcactcatcagtgactataccaaaacaagcttctttttttttggttttaatgtgtgctttgggtcatgactgaaaattttctatttattggaacaggtaaaatggattagagtgctgtactcagatttcacagcattcacaagagaccaagagaggttaatatctgcagaaaagacttttgactacattgaaggatttgtgataataaacagaactggtcttctaaataactggcgattatccttcaacccacgagacccggtccaagctagtcatttcaagtcggatggaagaactctcttctgccttgaaatggccaaatacttaaacgtggaagaaatcgatgcagcaaatcaggtgaggccagcaacactcaatctaatagatttttttgaaaataaagggataattaactccaaggttttaaaatatgagaccgtgggttgcaacatcaaagttttctaactctttgcgacccgaattgagactatgtcgatagcatttgtctatgatttgcccgtgatatcaacaaacacgaccaaaccacatgcgactgcgacctatatttaaaaccttgattaactcattagtgataatctttctttaggaaagaaaataaaagaggctaaatcaaccgtatctcacttttgtgtgtgcaggaagttgaggaacatttgtcccgtttaagctacatcccatcaactcttttttcaacagaagtcacatttgtagatttcttagacagggtgcacatatccgaggtcaagttgcgttcaaaaggcttgtgggatgttccacatccatggctcaatcttctaatacccaaaagccaaatactcaactttgcacaagtcgtcttcgggaacatcctatcagaaactagcaacggccccgtccttatctacccagtaaacaaatcaaagtaatgaatggttcagaaaaaaacatactattaactctagaaacaaatattttagccgtcaatattttttaattgacatgttttgttttgtttgcaggtgggacaacagaacttctgttgtgattccagaggaagatattttctacttagtggcatttcttacatctgcagttccatcttcaaatggaactgatggcctagaacacatactaagtcagaacaaaagaatattagaattctgtgaaagagcacaacttggagtgaagcagtatttgccccactacaacacacagcaagaatggagggcccattttggtcctcaatgggagacttttctgctgagaaagtccgtttatgatccattagcaatactcgcccctggccaacgtatatttcaaaaagcaataaccttctcatgaccacatttttattattaattattaaaaatctgaaaaaaaaaaagagaagaaaagtccttcatggcatgtgccaaaatgaaaaaaaaatgttatatgatccagacaggttttgacattgaccatacagaatgcaattgcaaaggaagaaggttcattgatagtagagaaaaagagggagaaaaagagattacaaaatgatgactggtgagatttgtatgccttgcaggttaatgaggaaagttgtcagtgtatgtaggtatgtaccattactgatggaaaaattgccttacgtgctgagtgtagcaccaaggcagcagggtccggctgagattagatcaacaaaacacattaatcattgtagggtttccaaagaacttataaatattatcagcgctagagccaatgtatagtactatcaattttgtaaacactcccttatttgttctctgtctcacatgtatccaaattcattaagattataattaaatacagatatttatgcatccaccacaaaaagatatcaatacgttcgcaacaaatacagataagatgatatataatgctgagtaacaaatactactattctagaaaattgcggaaaatgatataaaaatgggtatgcctaccctgaaggatgatgaat

SEQ ID NO: 190 - DNA, 5756 bp, Artificial Sequence
  Synthetic polynucleotide
ataaatggtagaaatctgtgggttcaaatgttcaattgctggggatcttcgtgatcatgatgattcatacacaatctctagaaacacgtacgcaaatattaattaatcaatttcctttttatagtctcctcacaattcacatgaaacttcatactctattatccgattccatttccatcgtatctttgaatttgacatttgtttgcccaacatgtaattaactttcccttctcatcttaaagatgtaacatgatatatattataacttgtaattaacccaatatttttaactctctatttttacactcatctgacatgtatttttatttttcatttttttttcttatcacatcacctcttacgtgtacaatttttctctttttcttatttctgtcttccataatagtaattaatattcatcggtccgatatgtatacagcccaaaaaagtgtgtaaaatcatttttgtatttctaaccctctctttctcatgcaagctagcttcttctttctatttatagcccttctcccttcacccaccaacacaccacaactccaaactttttcctcttgttctcttcttcttcaacacaactagtcataatccagctcatctctctctccctctctctttgttctctctttctctttctccaaaatggctctaaactacccttttttaacctacttcatactactgctagtaaccatattcactgtgggaaaaactgagcaatggaaagctccgattctaccagagcttgacattgataacatatcccacaaactccatgatgaccctgaaaccattcaaatggcttcaagggactatggccatttaacgcatgaattcccattagctgtgtttcgtccatcttctatagatgacatagtcaccttgataaaatcttcgtacaatagctttgccccttttgacatagctgcgaggggccaaggccactccactcatggacaagccatggctcgtgatgggattgtggtggacatggccagcctaagaaaacaaagaaatggggttgcgattagtgtctctaaggaccctttgatgggtcactatgctgatgttggaggggaacaactctggattgatgtgctacatgccacacttgaatatggacttgcaccagtttcttggactgattatttgtacttgaccgtgggagggacactttctaatgctggaatcagtggccagagcttccgttatggacctcaaatcagcaacgttcatgaaatggatgtcatcactggtatggagttagttgttttttttaatcaataaatgttaatattattagcttgttagttttttttgaaaaaattgaattaactttcgtttcctcttttctttctttttttaaccacacaattaatctaataactactggtattaagttagtttattttccatttttcatatataagttaggatttctaattaaaattgacatttcgtaccaccactacaaaaaaataatgtatcagtggcacaaaaaaatatattggcatcacttgtttttttagtcattaatattttgtagcatcacaaaaaatatggtgacaagttttctaaaaattacaaattaactgattcgtcagtgatgttaatgattttttagtgcgtcttggcaactaatgttttcatcttatataaaattagaaacaatagcggcaacagcacctgacattgtgtttgtgttttgcgtgtttctatcgcctaatttttgttgagaacgtgttcgtgaaacttggaaaaagagaaaattgaaattttcttgagatatctaccacttaagaaaaacaaatggctgtttccgttttgtctcttatgacatgacatggtacgtcatagatgaagttctgctaaatatatttgatatgatttcttgaacacgttttatatattcccacttcccagttagtgtggttgttgaatctaattaaaacaggaatagtctttgtctacaatatgggtgagcgatgcaaactttccaagggtttagaagttagaactatataggtccacggtcataattttatattcttgattaactttatgttggttaagtcgttcatatttggtcaattcattcatatgagaaaatactgaaatacaaacatggaaaaatgttaattactcttataattggcgcatgcatgcatctaaattatatgattttaataaatagtttttgtcatctacttgatttcaggaaaaggagagttcgtaacatgctcttcacagaagaacttggagttattccacgcggttcttggaggcttgggacaatttggagttatagcaagggcgagaattgctcttgagccagcacccaaaagggtacgtttatagagaattgactagaattttgtcttgtagcttttcctccaccaattcatatagtgacacctaatcgaattgtcatttttttttacggtgaattgtcattttgtaaatctaccaagtggtagttggcacccatatatgtatgaactatagtaccatacatttcattttatgttggtgtgttagtcatccatgatgaacacatacacaaatgaaaataggacgagttatacgtacgtaagggtttgaatcactgaatgtggatttttgaagttgaaagcatattaatcttggtttgaaaaagaaaaaaaaaatcggaagtccctcttgaagttatcatgactcttatattaagccaatagaattagaaaaactataattatgaatgatcatgttaattctttcagtgacttaaaatcttatctacaaaaagtacccttttgaaaaagaccttcacttaagtccatgcatacagtactaatcttacatacttgagagttgagacttgaagcatgaggagatttgaagtctggagaaacaagccaccacatattaattactaccgtattcttatctttatttatccttccaattttgatgggactggttgcacatacattcatacatactaacatacataaatacgtctctctctcatgtatttcattttattatattctatttcgttagtaagtttactagtataagacattattaatggtgaatttttgttggcatgcaggttaagtgggtcagactactttatagtgacttttctgcttttaccaaagaccaggaacgattaatctcaatcaatggaaggaaacaaaagaacgcattggattttctggaagggatgctgctaatgaaccaaggccccataaataattggagatcctctttcttccctctatctgaccatcccagaatagcttctttaataactgaacatagcatcctctactgtcttgaagtggctaaatattatgacgaacaaaccgagttaaatgtggacaaggtaacctcgtctagtcatatctattatatatagttagatcttgtcacatttctttgtttaaaaaataaaataaaaggcacaatcccaaaaagtcaaaagcaaatgcctagatattgtgtgttttcttggatattaattattacaccttaataacccataataatttttttatttttctttgtctctgtaggaaattgaagttttgctccaaggactagcctatatccctggatttaattatgagaaaaatgtctcgtacgttgagttcttgaatagggtccgaagtggagagttgaaacttcagtcacaaggactgtgggaagttcctcacccgtggcttaatttgtttataccaaaatctcaaatcttggattttaattcaggagtattcaaagatatagttcttaaaagaaacatctcctctggaccagtcttggtttatcccatgaatagaaacaagtaagccttgaatgcatgaatcacaatctagtgtcattataattcaggagtgtgtgatgcaatcttttaattttctgaccattcaactcaatatcaattttatttcttttttcaattaaaatgcaaaagagaataataattaataatatgaaatttaattccaggtgggacgataggatgtcagcatctataccagacgaggatgttttctacacagttgggtttttgcactcaagtgggtttgatacttggaaggcatatgatgctcaaaacagagaaattttggagttctgtagagatgctggcatcatggtcaagcaatatcttcccaaccacagcacacaagaagattggacaaaccattttggtgctaaatggatgaaattcttagaaagaaaacatcagtttgatccaagaatgattctatcacctgggcaaaaaatcttccacaaaaaattacagccagtgttttaaatattttccctaataaaaaaagtaaaaatgttttgtggtgggactacctcaattagatggctagctagggacaggtgtacatacagtgtgaccaagaccaagatggcttttgtatgctaaagtttgcattgctagctagagaaattaataaggtggggcattaaaggctgcatgagtacttttggcacctattatgctacatattaccttagatacgttaggttgacaaagtcgtactggtaggtacaagaagcacagttgtctctcacactgtctgtcacccaacttgctatatagtgtgtggagaaattcggatcatattgaagatgctgtgagttatagtcctccaatattaaatgtttaacgattctgtctttctcttatataattttgttttgcattatattactttcgcactggtgcaaacatatatatcaatgattataattaatttatacaatgacgagtataattgtacccaagttgcatgccataatatttgtcaaaaacaaaaagttgtatgccataatcaatccaggttgctagataataagatagatatgaatatgataacataaaatgctattaaagcaacaaataaacaataacacatagtccttatagggttcataattgatcgatgaacctagctagacgttgattttaggttaatttccagcgaggataaaatttattatataaagaaataactaaccaacacaaaataataaaaaattaaaaaaaaacgaagaaacttattttagagatataatttgttttagtatttgattgtaatttgagagattagctaggctctcaccaagtgagatctagagtatattcttaagaaaatatttataataaagaacccttaaacattttgcaaaacaaagggtggaattaatattaacaacaataattataatatcttgaaaattttatgaaaataatatatatatatatatatatatagagagagagagagagagagagagaaaattctcacaaacaatttttatctgttatttcaaattggtgtatgactccttagtccttagttcatttgtttgcacccagtcctgtcttaggtagttgattttatagttaggtaaattaatttctcgcactcttcgcttgattgtcatttatgggttgaactgttgaagtgattttatattttttaataaatttcacctgcaaaaaaactcaccattagcatacgccccccccccccccccccccccctctcccaaaaaaaaaaaaaaaacgaaagaagattaattagaaagaataaggtcgtgaaatgatgttacaaataaggcatatcagaatcagacgcaagggaagaataaaaacgttacaacaattcgcgcacaatgcaccccaaaaaaaaaatgacaggcacacataccttaaggaagaagaatcaacgctttca

SEQ ID NO: 191 - DNA, 5755 bp, Artificial Sequence
  Synthetic polynucleotide
ataaatggtagaaatctgtgggttcaaatgttcaattgctggggatcttcgtgatcatgatgattcatacacaatctctagaaacacgtacgcaaatattaattaatcaatttcctttttatagtctcctcacaattcacatgaaacttcatactctattatccgattccatttccatcgtatctttgaatttgacatttgtttgcccaacatgtaattaactttcccttctcatcttaaagatgtaacatgatatatattataacttgtaattaacccaatatttttaactctctatttttacactcatctgacatgtatttttatttttcatttttttttcttatcacatcacctcttacgtgtacaatttttctctttttcttatttctgtcttccataatagtaattaatattcatcggtccgatatgtatacagcccaaaaaagtgtgtaaaatcatttttgtatttctaaccctctctttctcatgcaagctagcttcttctttctatttatagcccttctcccttcacccaccaacacaccacaactccaaactttttcctcttgttctcttcttcttcaacacaactagtcataatccagctcatctctctctccctctctctttgttctctctttctctttctccaaaatggctctaaactacccttttttaacctacttcatactactgctagtaacatattcactgtgggaaaaactgagcaatggaaagctccgattctaccagagcttgacattgataacatatcccacaaactccatgatgaccctgaaaccattcaaatggcttcaagggactatggccatttaacgcatgaattcccattagctgtgtttcgtccatcttctatagatgacatagtcaccttgataaaatcttcgtacaatagctttgccccttttgacatagctgcgaggggccaaggccactccactcatggacaagccatggctcgtgatgggattgtggtggacatggccagcctaagaaaacaaagaaatggggttgcgattagtgtctctaaggaccctttgatgggtcactatgctgatgttggaggggaacaactctggattgatgtgctacatgccacacttgaatatggacttgcaccagtttcttggactgattatttgtacttgaccgtgggagggacactttctaatgctggaatcagtggccagagcttccgttatggacctcaaatcagcaacgttcatgaaatggatgtcatcactggtatggagttagttgttttttttaatcaataaatgttaatattattagcttgttagttttttttgaaaaaattgaattaactttcgtttcctcttttctttctttttttaaccacacaattaatctaataactactggtattaagttagtttattttccatttttcatatataagttaggatttctaattaaaattgacatttcgtaccaccactacaaaaaaataatgtatcagtggcacaaaaaaatatattggcatcacttgtttttttagtcattaatattttgtagcatcacaaaaaatatggtgacaagttttctaaaaattacaaattaactgattcgtcagtgatgttaatgattttttagtgcgtcttggcaactaatgttttcatcttatataaaattagaaacaatagcggcaacagcacctgacattgtgtttgtgttttgcgtgtttctatcgcctaatttttgttgagaacgtgttcgtgaaacttggaaaaagagaaaattgaaattttcttgagatatctaccacttaagaaaaacaaatggctgtttccgttttgtctcttatgacatgacatggtacgtcatagatgaagttctgctaaatatatttgatatgatttcttgaacacgttttatatattcccacttcccagttagtgtggttgttgaatctaattaaaacaggaatagtctttgtctacaatatgggtgagcgatgcaaactttccaagggtttagaagttagaactatataggtccacggtcataattttatattcttgattaactttatgttggttaagtcgttcatatttggtcaattcattcatatgagaaaatactgaaatacaaacatggaaaaatgttaattactcttataattggcgcatgcatgcatctaaattatatgattttaataaatagtttttgtcatctacttgatttcaggaaaaggagagttcgtaacatgctcttcacagaagaacttggagttattccacgcggttcttggaggcttgggacaatttggagttatagcaagggcgagaattgctcttgagccagcacccaaaagggtacgtttatagagaattgactagaattttgtcttgtagcttttcctccaccaattcatatagtgacacctaatcgaattgtcatttttttttacggtgaattgtcattttgtaaatctaccaagtggtagttggcacccatatatgtatgaactatagtaccatacatttcattttatgttggtgtgttagtcatccatgatgaacacatacacaaatgaaaataggacgagttatacgtacgtaagggtttgaatcactgaatgtggatttttgaagttgaaagcatattaatcttggtttgaaaaagaaaaaaaaaatcggaagtccctcttgaagttatcatgactcttatattaagccaatagaattagaaaaactataattatgaatgatcatgttaattctttcagtgacttaaaatcttatctacaaaaagtacccttttgaaaaagaccttcacttaagtccatgcatacagtactaatcttacatacttgagagttgagacttgaagcatgaggagatttgaagtctggagaaacaagccaccacatattaattactaccgtattcttatctttatttatccttccaattttgatgggactggttgcacatacattcatacatactaacatacataaatacgtctctctctcatgtatttcattttattatattctatttcgttagtaagtttactagtataagacattattaatggtgaatttttgttggcatgcaggttaagtgggtcagactactttatagtgacttttctgcttttaccaaagaccaggaacgattaatctcaatcaatggaaggaaacaaaagaacgcattggattttctggaagggatgctgctaatgaaccaaggccccataaataattggagatcctctttcttccctctatctgaccatcccagaatagcttctttaataactgaacatagcatcctctactgtcttgaagtggctaaatattatgacgaacaaaccgagttaaatgtggacaaggtaacctcgtctagtcatatctattatatatagttagatcttgtcacatttctttgtttaaaaaataaaataaaaggcacaatcccaaaaagtcaaaagcaaatgcctagatattgtgtgttttcttggatattaattattacaccttaataacccataataatttttttatttttctttgtctctgtaggaaattgaagttttgctccaaggactagcctatatccctggatttaattatgagaaaaatgtctcgtacgttgagttcttgaatagggtccgaagtggagagttgaaacttcagtcacaaggactgtgggaagttcctcacccgtggcttaatttgtttataccaaaatctcaaatcttggattttaattcaggagtattcaaagatatagttcttaaaagaaacatctcctctggaccagtcttggtttatcccatgaatagaaacaagtaagccttgaatgcatgaatcacaatctagtgtcattataattcaggagtgtgtgatgcaatcttttaattttctgaccattcaactcaatatcaattttatttcttttttcaattaaaatgcaaaagagaataataattaataatatgaaatttaattccaggtgggacgataggatgtcagcatctataccagacgaggatgttttctacacagttgggtttttgcactcaagtgggtttgatacttggaaggcatatgatgctcaaaacagagaaattttggagttctgtagagatgctggcatcatggtcaagcaatatcttcccaaccacagcacacaagaagattggacaaaccattttggtgctaaatggatgaaattcttagaaagaaaacatcagtttgatccaagaatgattctatcacctgggcaaaaaatcttccacaaaaaattacagccagtgttttaaatattttccctaataaaaaaagtaaaaatgttttgtggtgggactacctcaattagatggctagctagggacaggtgtacatacagtgtgaccaagaccaagatggcttttgtatgctaaagtttgcattgctagctagagaaattaataaggtggggcattaaaggctgcatgagtacttttggcacctattatgctacatattaccttagatacgttaggttgacaaagtcgtactggtaggtacaagaagcacagttgtctctcacactgtctgtcacccaacttgctatatagtgtgtggagaaattcggatcatattgaagatgctgtgagttatagtcctccaatattaaatgtttaacgattctgtctttctcttatataattttgttttgcattatattactttcgcactggtgcaaacatatatatcaatgattataattaatttatacaatgacgagtataattgtacccaagttgcatgccataatatttgtcaaaaacaaaaagttgtatgccataatcaatccaggttgctagataataagatagatatgaatatgataacataaaatgctattaaagcaacaaataaacaataacacatagtccttatagggttcataattgatcgatgaacctagctagacgttgattttaggttaatttccagcgaggataaaatttattatataaagaaataactaaccaacacaaaataataaaaaattaaaaaaaaacgaagaaacttattttagagatataatttgttttagtatttgattgtaatttgagagattagctaggctctcaccaagtgagatctagagtatattcttaagaaaatatttataataaagaacccttaaacattttgcaaaacaaagggtggaattaatattaacaacaataattataatatcttgaaaattttatgaaaataatatatatatatatatatatatagagagagagagagagagagagagaaaattctcacaaacaatttttatctgttatttcaaattggtgtatgactccttagtccttagttcatttgtttgcacccagtcctgtcttaggtagttgattttatagttaggtaaattaatttctcgcactcttcgcttgattgtcatttatgggttgaactgttgaagtgattttatattttttaataaatttcacctgcaaaaaaactcaccattagcatacgccccccccccccccccccccccctctcccaaaaaaaaaaaaaaaacgaaagaagattaattagaaagaataaggtcgtgaaatgatgttacaaataaggcatatcagaatcagacgcaagggaagaataaaaacgttacaacaattcgcgcacaatgcaccccaaaaaaaaaatgacaggcacacataccttaaggaagaagaatcaacgctttca

SEQ ID NO: 192 - DNA, 7384 bp, Artificial Sequence
  Synthetic polynucleotide
ttaaatcggttcaaaattgttgaatcgatccaaaactagtaaatacagtaggttaattgatttcacttgaaatttaaaaaaaaaaaattaaaatgacgtcattttagtttttttttaaattattataacttatatgacatttttaagtgaagtttactttttattattattaatttatgcatactaggtttctgaaatattatattaaaatattatatatatatatatatatatatatatatatatatatatatatatatatatatatatatatatattattaaaatcaattccacttcgattgagctattaacttttgaaccaatatcttccccagttcaatgaccatccaagtctgaaaacattggttaccatcaacgttacccttccgtgaattggaaaagttaatgcaatataggttgatccaaggataagtcctatggtcccagaaagaaaatcttgagagatccttttgataattacccgagtttttactctctccttttaattcacgaaattggaaacttcaattgctaatataaaaagaattttgttagccaatatcatcagggtattgtcaaagaattacaagaaaaaaaaattataagataacataaaaaaataaaaaacaacataattttatatattttaataaaaaattcttttaatttttttttatcaatattctatagttactggcatttgacatgtaaaaatgtaaacatatgaattgataaaatttgaccaatgtttgaccctgagataggaatccaacggccccagttcaattgcaatcttttatttttactacgtgaaggcccaacaatggagaaccttgtggattttattgctgagaatctgtggttacgatgatgacacaccaacacaatcacagaaagcaagtaccgtttggaaggcctaacacttcattaattgcttcattaaatttattttactttctagctgctcaatttaattgctttacacaaatacttcatgacgtttcagaaggagggccaaatacaatctctacaatggttccatcgtatctttgaatttgacatttagcatccctccctttgcacaatgtacaatttgcattttgaatatttttttctcaccttcatatcgtgggactacttctataaccatcctggtgaaaataaataaagcgagggaattacgtaattaaacatatttaaatttctctctcctctgtttaattaatttatcaaaaacaaatatgtgtgcgagtatttaaaaatgtgtaaagtattattattttttaatttttcttttttccttctcatcaatgataaatatactttttaatataaaaatcaaacaataactataaaaaaaacatcttcacttcaattcaacattaaataaaaaataatccctgctttgttattttttacccaccaattatcatatttgttatttattatttttttatgttcttgctataaaggaaatcactatttgactcacacaaaactataaaggaatcaaataatcaattattatttaaaaactctattaaaataacaattacaacaaaatcccttatttttttcttccttatcattattaaaccttcccattctctctttctatctctacatgtttttctcaaattaaatattttctatatcctcctttatcatgcaaattaaagtcctcttccattctatatatagccgctacctcctccacctcctttccccactacaacacacaaacaccaacaaccaaatcaatccatccaccctagaaacaacaaagcactctctcttctctcattctattatcttctctcatcctcttattctctccaaaccaacaaaaaaaaaatggttgctgagaactacccttctcccacatacttcatcctctaaccataacacgtttgatctccacagtgggcaaaacctcccaatggacgaaggccctgtcgctgcctccggaactcgcctccgtctccctcgacgacaccatcttctgcaagctccgtgacgacccagaggggaagggcctccagggactacgggaacctcgtccgcgaggttcccttggcagtcttccacccagcctcagcgagcgacatcgcgaggctgatcaagctgtcgtacaacggctctgtccccttcaagattgcggcgagggggcaagggcactcgacaaggggccaggcgatggcacgtgagggggtggtggtggacatggcggggttcagagagagagggaatggagtggggataagggttgtgagtagtgtggaccctaataataagaatggttactactattatgcggatgttggaggggaacagttgtggatcgatgtgctacacgccacgctcgagcatggacttgcacctatgtcctggactgattacttgtacttgacgctgggagggactctctccaatgctggcatcagtggccagacattccgctatggtcctcaaatcaccactgtccgggaaatggacgtaatcaccggtaagaaaactttccattcaaccagttaacttacatgtttttagttttttagcttccaatatccaatagtttataacttgtaagcttcaattttatgttaatttataagctagttttaccctacttttgaaaattcaaggattttggtactacaataactcccttgtcaaactcgttcaattgttggcttagtatcaagtagactcttggatttttaggtgtactttaacaaccatgttaatttaattgatcagggttttaatattatggaaattggccattggacaacttggaatggaaggaaagcgggagatggaaagggaaaagaaattaattagaataattgttaatattagttgcgtgaaaaaaattaaatttgctgaattaaattatggttcatcacgactctatttgtggcaacaccaacgtgccgttttcagaacttcattgcaacagcggttatagtggcgtttattcaattcatattttaatgcatcagactgtgattgcgattgaaattttatgaaatcttgttttataaacttgttcttttgattaggaaacttgattctattttatatatatttaatgtaacgccgaattaatggttgataaacgagtctttgtctaaaattttggcgaatgttagcaagcgttttccacgtggtcccgtacgtgtttgaaaaattcttaatcatggaatcagttcacacgggcagtcatagactcatagactccaattcttgattaattgttttcttattaatattggtccatggtcttattttggtcaattctttttattaaaaataaacgggctgctgaattttaatttactcaagtgtttgttaatgaatatgtgtgcatgcatgcaattatatatatatatatatattactattatttatttgtgttttaatcaaattttggtttggttcaggaaagggagaatttgtgacttgctctcagcagacgaattcggagttgtttcacgcggttcttggaggcttaggacaatttggaattataacaagggcaagaattgctcttgcgccagctccgaagagggtacgtttaaaatcttcggaattgactaggacttgtcttgttgcttcttcctccaacatctctcatatagtaacgcaaatttctaaatatgttacattattaattcaaccaccaagctttgcggaagcatcaaatgtcgttgtcctgaaagcttcatgtcatcatttttcttggcacccatatacacacacatacgtttcacattgtgtcagtgcatattagtcatccatgaaagacacatgtacaaatgaaaacgagaggagttatattaaaatgtgtgttggaaaaatatatatcatattttcataagtcttaattttgaaattaatatacagtaaccctttgagaccttagcaattaagccaataaaaaggctcgtattaaccccaaccaacaactattagaaaatactaacaagtataggtgtatacataaatgattcatttgaattttagtaccttaattatttaactttatccttctatttgacgggactcgttgcataagccatacatacataatcatgcgttcattattgtttttcattatgagttaatgagttgattgtatgaactaatggtgaatttttgttggcaggttaaatgggtgagacttttgtacaatgacttttctgcttttaccaaagaccaggaacaactaatatctatcactggaaggaaacaaaatgtttcactggattatttggaaggattgctgctaatgcaccaaggacccataaataattggagatcttctttcttccctttagccgaccatgcccgaataatttcgctagtaactaaacacagcgtcctctattgcctagaagttgccaaatattatgatggccaaaatgaaaacaatgtggacaaggtaccatctccattcatgtgcatttgccttgatgatgtttcttctattttttcttttaatgttttgatctcaccttatataataaccctttatcacactcaatcttgttatatttttaagagtttaatgataatattatgattttgttgtgaaaaaagagagtttaattgttattatataatcacaaattatcattaatatgacttttaaaataattaataatataaaaattaataaatttatcgtatttaatgagttataattaaatgatcatataaaattattttatattattaacatatagtttttttttctatttttaatatttgttttactataagttgttatattttcaatcttttttctagtataagttttaataatcaatattgtaagtaatattctcatttttcatgttgtgtaggaactccaagttttactacaaggattgagctatatccctggattttactatgaaaaagatgtctcatattttgagttcttgaatagagtccgaagtggagagttgaagctacagtcacaaggactatgggatgttcctcacccgtggcttaatttgtttataccgaaatctcaaatcatggaatttgactcgggcgtgttcaagaatatcatccttaaacgaaacatcaccacaggacctgtcttggtttaccccatgaatagaaacaagtaattgagcttaactaactaatctcaacttatgttgttatcattaggaaaaatgttaattggtacgaaaactatatataccactattttcatttaaattcatgaaagtgaaatttctctttcctaaaacaaattctttctcttaaaatgaatttttgtttttctcaatctccatcaattacttatttccttttttgaatgtttgaaaagtcattcacaacattttcttcataaaagggttattcgtaccaatttaaatagaattgccgttattatcagatgtacaattcttctcttcactcacttcttttccattaaaattgtaaaaaaaaaataaaaaaatcaggtgggacaataggatgtcagcatcaatacccgatgaggatatcttctacacagttggatttttgcattcaagtgggtttgataattggaaggcctatgatgctcaaaataaagaaattctacaattttgtaacgttgctgggatcaaggttaagcaatatcttccccactatcgcacacaagaagattgggcaaaccattttggccctaaatggaggacttttgtagaaagaaaacaccagtttgatccaagaatgattctatcacctggacaaagaatctttaacaattaaaatagctttaaaaatatatattcccccccccccccccccccccaaaaaaaaaaaaattatataatatggtgggactacccaagttagctagctggctgatcacaagtgtgcacataggacccagaattcagatgatagcctttgtacttgtttttgttaagagggtggggttaaaagctgcatgactttggcatatatgtagatcaggttacacatactttagatacgttaggttgacaaaatcatgtgtgaaataagatgcacacagctagctgtgtacctttctttctctctgtccctcaatttgtctatcactaaaaagatttctatatagtttagaacctagtgaagagaaagaaaaaaccattatattgaggatttaattttatcacgttctaatcctatacattaatattcttaaatgtgcaatgagtgtgctcggtgccttaatgattctttatctttgttaattgttatattgtagggttttgtttttgccttcctaattttgtaacaggggcacccctagcaataattgagatcctaggttaactaaggaacagcattattgtgtctaaattgagattcctagctgtatgccataataataaatcatcgtaggttgctagatagatgtgatagcgccaaatgccttccaatactataatctccattgcaagatccttcgttgtgattgtgtagaaaagattacgctgctttacaagagaatactccaagaaagcaagtgattgctccttaatataaagaatcatgcaataaacaaatggtgtcgtaatccataaagtgtatttaatatttgatgaaagagtagtgtagacatcaaacaaaataaagtttgatgcaattcgaattatagatacttgattaatctctaaattatgttgagacaatcatatttgaatttgataagactattatgaacgataaaaaatattataaataataaaaaaatttcatcaaacatttaatacaattatataccttactcaaatttgaaaacctgtacatataggaaaaaaacctttactaaaagaggttaaactcaccatacggatttttatatgtcgaagggatctttaattgtccatcggaaaacatcctaattcataaaaaaggaaagaaagtttagacatgaataattacggaccaatgaatgcaacctacgtctctcaattttaaggagaatttaggaatattatagtatatcactgaaagtacacacaagtggcaatgatgaatattttaatttaaagttttaattggattcgaaattaatcccttcttttttccagaaaaaataataatcatcgagtaatcaagacaatttcccaagtagacaacaagaatacaaaagagaatacgtgacttcgtttcaccatagaaaagaaggaatgcaataacgatgataataattataaaatgaaattgacaaaatatctaaatgcctgtagatatttctacagcgaatgataagtgtttttccattaaaaataagtttcttttgttaagaatttctaacatttttagttccaaaatataggaatgaagccaataagtaagtaagaatttctaacgtctgaaag

SEQ ID NO: 193 - DNA, 7376 bp, Artificial Sequence
  Synthetic polynucleotide
ttaaatcggttcaaaattgttgaatcgatccaaaactagtaaatacagtaggttaattgatttcacttgaaatttaaaaaaaaaaaattaaaatgacgtcattttagtttttttttaaattattataacttatatgacatttttaagtgaagtttactttttattattattaatttatgcatactaggtttctgaaatattatattaaaatattatatatatatatatatatatatatatatatatatatatatatatatatatatatatatatatattattaaaatcaattccacttcgattgagctattaacttttgaaccaatatcttccccagttcaatgaccatccaagtctgaaaacattggttaccatcaacgttacccttccgtgaattggaaaagttaatgcaatataggttgatccaaggataagtcctatggtcccagaaagaaaatcttgagagatccttttgataattacccgagtttttactctctccttttaattcacgaaattggaaacttcaattgctaatataaaaagaattttgttagccaatatcatcagggtattgtcaaagaattacaagaaaaaaaaattataagataacataaaaaaataaaaaacaacataattttatatattttaataaaaaattcttttaatttttttttatcaatattctatagttactggcatttgacatgtaaaaatgtaaacatatgaattgataaaatttgaccaatgtttgaccctgagataggaatccaacggccccagttcaattgcaatcttttatttttactacgtgaaggcccaacaatggagaaccttgtggattttattgctgagaatctgtggttacgatgatgacacaccaacacaatcacagaaagcaagtaccgtttggaaggcctaacacttcattaattgcttcattaaatttattttactttctagctgctcaatttaattgctttacacaaatacttcatgacgtttcagaaggagggccaaatacaatctctacaatggttccatcgtatctttgaatttgacatttagcatccctccctttgcacaatgtacaatttgcattttgaatatttttttctcaccttcatatcgtgggactacttctataaccatcctggtgaaaataaataaagcgagggaattacgtaattaaacatatttaaatttctctctcctctgtttaattaatttatcaaaaacaaatatgtgtgcgagtatttaaaaatgtgtaaagtattattattttttaatttttcttttttccttctcatcaatgataaatatactttttaatataaaaatcaaacaataactataaaaaaaacatcttcacttcaattcaacattaaataaaaaataatccctgctttgttattttttacccaccaattatcatatttgttatttattatttttttatgttcttgctataaaggaaatcactatttgactcacacaaaactataaaggaatcaaataatcaattattatttaaaaactctattaaaataacaattacaacaaaatcccttatttttttcttccttatcattattaaaccttcccattctctctttctatctctacatgtttttctcaaattaaatattttctatatcctcctttatcatgcaaattaaagtcctcttccattctatatatagccgctacctcctccacctcctttccccactacaacacacaaacaccaacaaccaaatcaatccatccaccctagaaacaacaaagcactctctcttctctcattctattatcttctctcatcctcttattctctccaaaccaacaaaaaaaaaatggttgctgagaactacccttctcccacatacttcacgtttgatctccacagtgggcaaaacctcccaatggacgaaggccctgtcgctgcctccggaactcgcctccgtctccctcgacgacaccatcttctgcaagctccgtgacgacccagaggccctccagggaagggcctccagggactacgggaacctcgtccgcgaggttcccttggcagtcttccacccagcctcagcgagcgacatcgcgaggctgatcaagctgtcgtacaacggctctgtccccttcaagattgcggcgagggggcaagggcactcgacaaggggccaggcgatggcacgtgagggggtggtggtggacatggcggggttcagagagagagggaatggagtggggataagggttgtgagtagtgtggaccctaataataagaatggttactactattatgcggatgttggaggggaacagttgtggatcgatgtgctacacgccacgctcgagcatggacttgcacctatgtcctggactgattacttgtacttgacgctgggagggactctctccaatgctggcatcagtggccagacattccgctatggtcctcaaatcaccactgtccgggaaatggacgtaatcaccggtaagaaaactttccattcaaccagttaacttacatgtttttagttttttagcttccaatatccaatagtttataacttgtaagcttcaattttatgttaatttataagctagttttaccctacttttgaaaattcaaggattttggtactacaataactcccttgtcaaactcgttcaattgttggcttagtatcaagtagactcttggatttttaggtgtactttaacaaccatgttaatttaattgatcagggttttaatattatggaaattggccattggacaacttggaatggaaggaaagcgggagatggaaagggaaaagaaattaattagaataattgttaatattagttgcgtgaaaaaaattaaatttgctgaattaaattatggttcatcacgactctatttgtggcaacaccaacgtgccgttttcagaacttcattgcaacagcggttatagtggcgtttattcaattcatattttaatgcatcagactgtgattgcgattgaaattttatgaaatcttgttttataaacttgttcttttgattaggaaacttgattctattttatatatatttaatgtaacgccgaattaatggttgataaacgagtctttgtctaaaattttggcgaatgttagcaagcgttttccacgtggtcccgtacgtgtttgaaaaattcttaatcatggaatcagttcacacgggcagtcatagactcatagactccaattcttgattaattgttttcttattaatattggtccatggtcttattttggtcaattctttttattaaaaataaacgggctgctgaattttaatttactcaagtgtttgttaatgaatatgtgtgcatgcatgcaattatatatatatatatatattactattatttatttgtgttttaatcaaattttggtttggttcaggaaagggagaatttgtgacttgctctcagcagacgaattcggagttgtttcacgcggttcttggaggcttaggacaatttggaattataacaagggcaagaattgctcttgcgccagctccgaagagggtacgtttaaaatcttcggaattgactaggacttgtcttgttgcttcttcctccaacatctctcatatagtaacgcaaatttctaaatatgttacattattaattcaaccaccaagctttgcggaagcatcaaatgtcgttgtcctgaaagcttcatgtcatcatttttcttggcacccatatacacacacatacgtttcacattgtgtcagtgcatattagtcatccatgaaagacacatgtacaaatgaaaacgagaggagttatattaaaatgtgtgttggaaaaatatatatcatattttcataagtcttaattttgaaattaatatacagtaaccctttgagaccttagcaattaagccaataaaaaggctcgtattaaccccaaccaacaactattagaaaatactaacaagtataggtgtatacataaatgattcatttgaattttagtaccttaattatttaactttatccttctatttgacgggactcgttgcataagccatacatacataatcatgcgttcattattgtttttcattatgagttaatgagttgattgtatgaactaatggtgaatttttgttggcaggttaaatgggtgagacttttgtacaatgacttttctgcttttaccaaagaccaggaacaactaatatctatcactggaaggaaacaaaatgtttcactggattatttggaaggattgctgctaatgcaccaaggacccataaataattggagatcttctttcttccctttagccgaccatgcccgaataatttcgctagtaactaaacacagcgtcctctattgcctagaagttgccaaatattatgatggccaaaatgaaaacaatgtggacaaggtaccatctccattcatgtgcatttgccttgatgatgtttcttctattttttcttttaatgttttgatctcaccttatataataaccctttatcacactcaatcttgttatatttttaagagtttaatgataatattatgattttgttgtgaaaaaagagagtttaattgttattatataatcacaaattatcattaatatgacttttaaaataattaataatataaaaattaataaatttatcgtatttaatgagttataattaaatgatcatataaaattattttatattattaacatatagtttttttttctatttttaatatttgttttactataagttgttatattttcaatcttttttctagtataagttttaataatcaatattgtaagtaatattctcatttttcatgttgtgtaggaactccaagttttactacaaggattgagctatatccctggattttactatgaaaaagatgtctcatattttgagttcttgaatagagtccgaagtggagagttgaagctacagtcacaaggactatgggatgttcctcacccgtggcttaatttgtttataccgaaatctcaaatcatggaatttgactcgggcgtgttcaagaatatcatccttaaacgaaacatcaccacaggacctgtcttggtttaccccatgaatagaaacaagtaattgagcttaactaactaatctcaacttatgttgttatcattaggaaaaatgttaattggtacgaaaactatatataccactattttcatttaaattcatgaaagtgaaatttctctttcctaaaacaaattctttctcttaaaatgaatttttgtttttctcaatctccatcaattacttatttccttttttgaatgtttgaaaagtcattcacaacattttcttcataaaagggttattcgtaccaatttaaatagaattgccgttattatcagatgtacaattcttctcttcactcacttcttttccattaaaattgtaaaaaaaaaataaaaaaatcaggtgggacaataggatgtcagcatcaatacccgatgaggatatcttctacacagttggatttttgcattcaagtgggtttgataattggaaggcctatgatgctcaaaataaagaaattctacaattttgtaacgttgctgggatcaaggttaagcaatatcttccccactatcgcacacaagaagattgggcaaaccattttggccctaaatggaggacttttgtagaaagaaaacaccagtttgatccaagaatgattctatcacctggacaaagaatctttaacaattaaaatagctttaaaaatatatattcccccccccccccccccccccaaaaaaaaaaaaattatataatatggtgggactacccaagttagctagctggctgatcacaagtgtgcacataggacccagaattcagatgatagcctttgtacttgtttttgttaagagggtggggttaaaagctgcatgactttggcatatatgtagatcaggttacacatactttagatacgttaggttgacaaaatcatgtgtgaaataagatgcacacagctagctgtgtacctttctttctctctgtccctcaatttgtctatcactaaaaagatttctatatagtttagaacctagtgaagagaaagaaaaaaccattatattgaggatttaattttatcacgttctaatcctatacattaatattcttaaatgtgcaatgagtgtgctcggtgccttaatgattctttatctttgttaattgttatattgtagggttttgtttttgccttcctaattttgtaacaggggcacccctagcaataattgagatcctaggttaactaaggaacagcattattgtgtctaaattgagattcctagctgtatgccataataataaatcatcgtaggttgctagatagatgtgatagcgccaaatgccttccaatactataatctccattgcaagatccttcgttgtgattgtgtagaaaagattacgctgctttacaagagaatactccaagaaagcaagtgattgctccttaatataaagaatcatgcaataaacaaatggtgtcgtaatccataaagtgtatttaatatttgatgaaagagtagtgtagacatcaaacaaaataaagtttgatgcaattcgaattatagatacttgattaatctctaaattatgttgagacaatcatatttgaatttgataagactattatgaacgataaaaaatattataaataataaaaaaatttcatcaaacatttaatacaattatataccttactcaaatttgaaaacctgtacatataggaaaaaaacctttactaaaagaggttaaactcaccatacggatttttatatgtcgaagggatctttaattgtccatcggaaaacatcctaattcataaaaaaggaaagaaagtttagacatgaataattacggaccaatgaatgcaacctacgtctctcaattttaaggagaatttaggaatattatagtatatcactgaaagtacacacaagtggcaatgatgaatattttaatttaaagttttaattggattcgaaattaatcccttcttttttccagaaaaaataataatcatcgagtaatcaagacaatttcccaagtagacaacaagaatacaaaagagaatacgtgacttcgtttcaccatagaaaagaaggaatgcaataacgatgataataattataaaatgaaattgacaaaatatctaaatgcctgtagatatttctacagcgaatgataagtgtttttccattaaaaataagtttcttttgttaagaatttctaacatttttagttccaaaatataggaatgaagccaataagtaagtaagaatttctaacgtctgaaag

SEQ ID NO: 194 - DNA, 3657 bp, Artificial Sequence
  Synthetic polynucleotide
cttctcatccaatctaatagcaggatacgcgatgtttacattccgacaatagtggactcagtaccaacaccataaaaaaaaataaacaactagttatgtgtccataggggcaaaagaaaaagaaatacgcactactgtggaaagaagaaaaaaagcaataaggacttatttctatatccggaaaaagcatatatccttaaattggttaatgaacaaaaacttgaaacatgtctttccttcatgtttttgttgtaacttataacataacatgtaattgtttgtggttaccactgtttggaaaaagttgaagatttgtgagatctctcattgatgttacttttcctcttcaacttggcttctgtgtcactgtacatgtgatgcctttggcgtctctcttccttccaagtaagcagtccacatacgcattctcctcgtatcgtatgtcataagtcatgactgatcaacaatgctacgttgaccaagccaccacccacaaactcctttaaattctggcccaaacccttaagttcctgcattctccaatccatcactttctccttttcctcgtgttcacaaaatcacgctgcttaattattccttcaactaccatcatatcataccttctcaacagaaaaataaaaataaaaatgagatacatccttggagaacacaacattctgttcctcaaaagcttcgccttcacgatattattccttagttgcatagccattcggcttaacttgtgtctttccagcatcccttcttcactgaaatcaattttgaagggcatttaaaatttgatcaagttagcctaagccatgcagcaagggactttggcaacaggtaccaatataatccaatggcagtgctgcaaccagaatcagtttctgatattgtagccaccataaggcatatctggctgatgggtcctggctcccacctcaccattgcagcgaggggccacggccactcgctgcagggtcaggctcaagcccatggaggacttgtgatcaacatggaatcactcaaggtcccagaaatgcaggtatatcgctaaatattaattgttaatcgttaattttttgttagctaggcaatcaaatccacaatcttttcctctcttccttcttcttatacaaccaaactaaccttataactccaatgcagatacatgttgatgagggaaacaagtctcctccatacgtggatgtctcaggtggcgagttgtggataaacatattgcatgagactctaagatacggcttggcgccaagatcgtggacagactacctgcatctcacagttggtggcactctctccaacgctggtgtcagtggtcagacatttaggcatggtccccagataagtaatgtacagcagctcgagattgttacaggtttgtgaaaaagagaatgaataataattgtttgtcttttctgaataataattcatttgatactggctgcatataagttttctaataaataatttttttcccctactttgatgagtaaaacatggtcaatgaatggatgcaggaacaggggaggtgttgaactgttccgcggagaataatggggatctctttcatggtgttctagggggcttggccaatttggcattataacccgggcaagaattgtcctagaaccagcacctaccatggtaatgcatcactcatcagtgactataccaaaacaagcttctttttttttggttttaatgtgtgctttgggtcatgactgaaaattttctatttattggaacaggtaaaatggattagagtgctgtactcagatttcacagcattcacaagagaccaagagaggttaatatctgcagaaaagacttttgactacattgaaggatttgtgataataaacagaactggtcttctaaataactggcgattatccttcaacccacgagacccggtccaagctagtcatttcaagtcggatggaagaactctcttctgccttgaaatggccaaatacttaaacgtggaagaaatcgatgcagcaaatcaggtgaggccagcaacactcaatctaatagatttttttgaaaataaagggataattaactccaaggttttaaaatatgagaccgtgggttgcaacatcaaagttttctaactctttgcgacccgaattgagactatgtcgatagcatttgtctatgatttgcccgtgatatcaacaaacacgaccaaaccacatgcgactgcgacctatatttaaaaccttgattaactcattagtgataatctttctttaggaaagaaaataaaagaggctaaatcaaccgtatctcacttttgtgtgtgcaggaagttgaggaacatttgtcccgtttaagctacatcccatcaactcttttttcaacagaagtcacatttgtagatttcttagacagggtgcacatatccgaggtcaagttgcgttcaaaaggcttgtgggatgttccacatccatggctcaatcttctaatacccaaaagccaaatactcaactttgcacaagtcgtcttcgggaacatcctatcagaaactagcaacggccccgtccttatctacccagtaaacaaatcaaagtaatgaatggttcagaaaaaaacatactattaactctagaaacaaatattttagccgtcaatattttttaattgacatgttttgttttgtttgcaggtgggacaacagaacttctgttgtgattccagaggaagatattttctacttagtggcatttcttacatctgcagttccatcttcaaatggaactgatggcctagaacacatactaagtcagaacaaaagaatattagaattctgtgaaagagcacaacttggagtgaagcagtatttgccccactacaacacacagcaagaatggagggcccattttggtcctcaatgggagacttttctgctgagaaagtccgtttatgatccattagcaatactcgcccctggccaacgtatatttcaaaaagcaataaccttctcatgaccacatttttattattaattattaaaaatctgaaaaaaaaaaagagaagaaaagtccttcatggcatgtgccaaaatgaaaaaaaaatgttatatgatccagacaggttttgacattgaccatacagaatgcaattgcaaaggaagaaggttcattgatagtagagaaaaagagggagaaaaagagattacaaaatgatgactggtgagatttgtatgccttgcaggttaatgaggaaagttgtcagtgtatgtaggtatgtaccattactgatggaaaaattgccttacgtgctgagtgtagcaccaaggcagcagggtccggctgagattagatcaacaaaacacattaatcattgtagggtttccaaagaacttataaatattatcagcgctagagccaatgtatagtactatcaattttgtaaacactcccttatttgttctctgtctcacatgtatccaaattcattaagattataattaaatacagatatttatgcatccaccacaaaaagatatcaatacgttcgcaacaaatacagataagatgatatataatgctgagtaacaaatactactattctagaaaattgcggaaaatgatataaaaatgggtatgcctaccctgaaggatgatgaat

SEQ ID NO: 195 - DNA, 8267 bp, Artificial Sequence
  Synthetic polynucleotide
ctacttctagaatgacaactactcctatggcaatatcaattgttagcggtggttcccttaagttcgagactaagggcagtctccaaaaggaagaaaggaaataacaaacttaagcctgaatgttctacgttttatttagtgtctcttgatatttaaaggtctatcaaatatgtataataaccgcacttccactataataaccacactcccactacgataatcgctacaataaccaccacaataactacttctaggatgacaactacctctatataagtttccatgacagaacatcttcttcctaacaccttacctatcacaaatgcttctcctctcggtgtcagagagtactattgattccctaagttctgacggtgtctttttctaaccaaagatccacttttcgaaggtcccgagccaattcgatgagagctcggaggcatagaactcggtttagtcacttatgccatgcttcatttcgtcgcgcgtactttaccaatcaacacacgccatcgagattgatctgcaagtgcagattacgtaagcgagaaaggatttgcaatggaattcacaaatcgcacaatcagagaacaggataagtgtactgctaattatgagcgccagggagtgtagattcatgtcttaggttttaaaattagaacagaataaatatgaaaattgttttttactttctatattttatattttaatttttttttagtttttattattagtaatattgttaattataattaattataaaaattttaacaagtaatttattactaatttatcataagataatttataataaaaaaataattgataatttataattaatttataactaattatttttatattttgtttagtaaagactaaaaggtaattaaaatgtaaattatagagattaaaatatcatttttaaactataagaactaaaaaagaattaaaatacaaactataagacaaaaaagatcacttttaaactataggaactaaaaaaattacttttaaattatatggactaaaaaataccaatcgtaaaattataggaactaaataaataatataaccttaaattttttattttaagatcaattttttaaaaaattaatgttaatcatgatattttatttataaaatatcaaaactcattttgtaaaatggattttcatcaaaataaacgttcactttgctatggtaaatcttgttttgtagtattttggttgttctgacccaaatgacccaaatgcaggctagtggacaatgacattgattgttttgtatatgggttgggtgtcccttgtatcctattgatatattccttttgccttattaagaaaaattgcattagaaactactatatattaaatgctctaacaattaatgattaaattgacaccacatcctgtttgactctccacttttcttttattggtactctctattttagtctgctctttatatacatgttaacttaaagacagcaaatttaccaaagtaacttatcttctctcttgaaagaaaaatgccacagaggaatttagtactattttccacaactatggttgtgctattgctatctagcatagtgctcacacaagcacaaccacgatcatggtcagcattccaagcatccaaagaactagccacaaagcttagtcgtaaccctcaaacctttccacatgcctcaaccgcatagttcacaaaaccccagtggcaattttcaatccatcttctgttagtgacatcttggccttgatacatttctcaaactctcttcctaacccattccccatagcccctagagggaaagcacactctgttcatggacaagccatgacaaaagatggggtggtgttgaatatgactaacctcaatagcagttttcaaaatgggttaggggttttggtgtctgcttgtgatggaaaaggtccattgatttgttatgctgatgtaggtggtggccaaatgtggatcgatgtcttgcatgcatcccttgaacgtggactcacacctttgtctttgactgattatatgtatgccactgttgggggcacactatctaatgctggcatgggtggcatgtcctttcgatttggacctcagatctctaatgttcttgaattggatgttattacaggtatgactcactcaattttatcaattaattttcttccatactcatctacacgcttgttcgaagtgaaacatttaactgaattttttttatcttggatatcacaattgtgtaatttttcgtctagatttgtgattatgttaattcaatctgtatatcttaataattatattaaagtccctccctccttcaattatctgtcaaatatttaacgaaatatatttatgtgacatttgagaatgttgatgggtttatatgtgttattttagtcgattagattttacgtgtgaagttttagtgtctcccaaattcttattaacattgtgggaaaaaatgagaaaacaatcgcagaactggagtttgattccagattattattattatttagtaattttattattatctatatcataatagtatatttattaactcatttaatatcatatttattacatatatttagtgtaataatagtatatttattacattctttttacatacaaaaagtcagaaagacttaaaagcttctacaaaaagaaatacctgttatatcagctcttaaagaattacatatgaaatcctacgcatttattacacacacacaaatatatatatatatatatacttaaacagaaatatgaattgttattatatttataattagtatttatattaatagaacaatttatagtttatactatggaataaatttttaaatataaatttattatttatattgatatactcatttatagtttttactaagatataagtttataaatataaatttgcacctcttgtgattttgaactggttttttaataaataaaaaataaataaaaagattataaatataaattattattacattaacataataatttacatttattaatttaatactaaatatatatagtaaatgtatcattaaatgaatgtagtaaacatattattaattttcagaaaagttttaatactttttcaccctagaaatatacaaattttttttaattgatataatttttttttgtttatgattcttgtattaatatttaaaccttccgttggagattaacgggtaaaaaatacaaggtttaaacattatataagtaaagttttcttacaacgacaaaacaaaactaattaatatatttacagctaatgatgtttgtttaaaaagtgctaattatatttttttgttctagtcaatgttgtatagttacccaacatataatcagtgacggactttttagttgtggggaaatattcattatatatatatatatatatatgaatcggtgctgcatataatacaatatatacaattttacactgaaaactgtatattattaaaatttatcaggaattatgcttaaatatcttattgtatctatcttattaaagaaatctaattatatctataaaataaaggtttatttcgatcgttttgatatattgtaaatattattttttttgtttgtttttctcgtataaactttaatacatctatatatgtggcttttatatatagggaaaggagaccttgtgacttgctccaaggagcagaactcagaggcattttacgctgctcttggaggattaggtcaatttggggtgataacaagagcaagaatacctctaggacctgcacctactagggcaagtattagtttcccctttcatatagatttcgtaagggtgaaaataaaaataatattttataggactaaaattaaactaatttcatataaacctaaattaaaactcactcaaattatagatgtattaaaatcatatttaatctatatatatgccatttaattttaattgaaacatacatattatatatagatcattttttcctgtaaacttagtcttagacactatacaacttcaatactattaaaattgtaccaaaattaactatcttaaaactaaaaatgagaataagtcgggtaattgacataagtctatgagctcacttgtttaaagcttggtctcatctatctaataaaaaaagttaaacttaaactttttaaaaagtctatttatttatataatttagacttggacttgtgaaaaaacttattaaactgtatagaccggtctaattattcatttaaatatagtaaaacattaaaatatattatacttttattttaatatcttaatatgttaatatatttttatcataaataaaatgaatatttgaaataaatagatctttaaatatgtaataagctaaactatatcatatcttaatttttataacatgccatacctatatatttatataacgtctaacttgacctaacatattatcacccctacttaaaaattatttatctatttatttttaacaaagtttttttcatgtgggtgtttgcaggtaaaatggctccgcctgctatacaacaacttcactgcattttcaagagaccaagaacatttaatatcgttcagtgaaaggaatgacattgctacagcagattatgtagaaggcatgcttctattgaatcagccgccactggatcttctcttttatccagcttctgatcatcaaagggtaacttccttggtaactcaatatggcattatctacatcttggagcttgccaaatactattacaataactctcaggcacatgtcaatgaggtaacttgaaataaaagttgtttttagcatctagttagaaacttcttttatttttattcttatttttttatggacaacatatataatgaatttagtaaagaaatacagagatattctaattgttatatattcatcatacatcaaagatcaaattaatcctcctgattgaaaagaattttgttttcatgaatccaaaagaaacatgtctcaaactcactcaaattgtatggaacccatatattaattaatttatgtacaattcattgttttttactaaattgattatttttcttgtttcttaaataggaagttgcatatttgctgaaagggttaaactttgtacatacatttgtgttcgaaagagatgtgtcatacgaggagtttgtgaacagagtttatcctttggagcaaatgcttaggtcagaaggactttgggaagttcctcacccttggctgaacctctgggttccaagatctagaatctcagattttgatgaaggtgttttcaaggacattgttcttaagcaaaatattactggcggaagttttctagtctacccaacaaacagaagaaacaagtaaattgattagattatttatttttttgtgagtgtcaaattattatctagatcacccgtctcctttaatttacatatcctttctagtgtttccaatatataaaaaaatgacacctcactaaaaaaaataacaaataagagaatttattgttttttaaccacatttttttattgagagaaaacactccacaagaaaaataataataacaacaaaataatttatgtaatttttaaaagaaaaggtcacttaaatttttgcaactctaaaattagttattgaaaaaaaaaacctcaagtctcacatttactagaggaacctcctaagttttttctaaaatgaatatatttctaaaggatatgagacttaaagttttttcaatattaatttacaacattgtgctctgattcaaagtcaagcaatctcctagaataaaagagattgaaaatagcactaacactattggtggggtttgtggtttgtggtctgtggatttaaatttggcatgtggtatttaacagaacttcaacagaggtataaattataaaagatttttttttctgagaaaaagaaataaatggaggtatgttattaaaagagggagtatgaataacaactgtcctaataatactccattgggcctgacagtaggagttgggccataacaattagggacaaaaaataattttggttactaaatttagtcaataattccttttcttagtcacattagatgtttctgttccaatttatttgcttatgtaaatgacttaatttatacatatgtgaggattaaattgaatcaacattatgcttcacaggtgggatgataggatgacaccaattacacctgacgaagatgttttctacgttgtagattttttgcgtgttgctaaaacgtttgatgtggtggacaaactacaggttcaaaacaaacagatactgcggttttgtaatgatgctggtattaagatcacagagtatcttatcgggaacaaaactcatcaacaatgggtggaacactttggcccaaaatggaaactttttgcagatagaaaaactgaatttgatcccaaaaaaatattgtcacctggacatgggattttccagtaaataatgtgctaggtttcagtgaaatctctcattttggaaattcatgaaataaaaatgaaattctgtaccagaaaaaaaaaaaaaaacttgttgtgtaattctgtgccaaacatacattgaattggattgaagttattatgcaattttgtacgaaaaaaaacttatgtatttgattattttatgtttttttattaatgttgaatgttcaaatattctcatgactcacgaacaacggcagatctagaagaaaaaaatggtcgtaagatgtgttgatggtatttaaatgaatgcatgtctacttcaaaatttatttgatagactcatttcgtaaaaaaaaaaaatagaaataacctatttaacaatacttgtttggaaaataaatttaaaaataagaaatttggtcgtttttttatatagaaaatagcattgtttttatgatattttaatgcaattcacgattttatgttgttgggtttttaaataaataaaagttacataaaactttagttttaaattttctttgggactgtgaatggagttaaactctaaaaaagatctataattccaaagtcaggttaccatcaaatattgacatatagcaaaaaaaaaaactactcccttgggaaaattatataaaatattaccttgtcaagagacttgcatttatacaaatgatttatttagcaaaattgttgcatcatgatcaaataggacaaacgttgctaaatcaatgtcactaggcattggcacccttacaagttacaagatacctttaagaaatcgaaaactatttttttcaaaccctttgttttgtgaattaactctttatgagctattttatccctctcaatcggaatataaagagatttttccttacatgacactagtggtctgatcctaagtttgagcttgctcgatgataagcaatgattttaagttttgggtgagaatatataaaaacattggttggagcgttttttgtttttatttttaaagaaaataaaaaataagaatgaaaatatatttatttaaaatttagaaaatattttttctgaatatatttttgaaatagaccaaaaactgaaaataataaatcaacattttcagtcttgtttgaaaaggtgaaaacagcgtggtaccttagagtgctttcttcttaatacattttttttaatcttaaaaatttgaaaatgaaaataaaaaataaacgctcaaatcaagctccacctaaatttttctctattgcaaatgttgaaaaaaatggaaaagcaaaagatctcaaagtaaaataaatatattgtcttttgttacattttgtttcaatgattgtggggaataattgaggtaggataagtggtaggaaaaaatatcaagcaacggataatggtaattgttttatataaaggtttaaatatatttttagtcttttaatttaaaattattattattttttagtccttaaaaacaaatatgcaaattttagtaatctaaaattttaaaatctagttttagtcttgttttgttaactctataacagaggttgtctgtgtggaaaatgatgtgcaattttgtggcgatttctttagtgtgaaaattttgttttaaatttaaatcaaacaaaatgtctcgcaaggcaacaataacgttgttgctgctaacaatcttcgtgtggcaaaatcaacagtggagaaaacgactatcaacaatgttagagaagagttgacgaaggaaaatggggaaaataggacaaacccgaacaaaaaaaccacccttgacttg

SEQ ID NO: 196 - DNA, 8262 bp, Artificial Sequence; identical to SEQ ID NO: 137
  Synthetic polynucleotide

SEQ ID NO: 197 - DNA, 7387 bp, Artificial Sequence; identical to SEQ ID NO: 125
  Synthetic polynucleotide

SEQ ID NO: 198 - DNA, 3651 bp, Artificial Sequence; identical to SEQ ID NO: 150
  Synthetic polynucleotide

SEQ ID NO: 199 - DNA, 5687 bp, Artificial Sequence
  Synthetic polynucleotide
ataaatggtagaaatctgtgggttcaaatgttcaattgctggggatcttcgtgatcatgatgattcatacacaatctctagaaacacgtacgcaaatattaattaatcaatttcctttttatagtctcctcacaattcacatgaaacttcatactctattatccgattccatttccatcgtatctttgaatttgacatttgtttgcccaacatgtaattaactttcccttctcatcttaaagatgtaacatgatatatattataacttgtaattaacccaatatttttaactctctatttttacactcatctgacatgtatttttatttttcatttttttttcttatcacatcacctcttacgtgtacaatttttctctttttcttatttctgtcttccataatagtaattaatattcatcggtccgatatgtatacagcccaaaaaagtgtgtaaaatcatttttgtatttctaaccctctctttctcatgcaagctagcttcttctttctatttatagcccttctcccttcacccaccaacacaccacaactccaaactttttcctcttgttctcttcttcttcaacacaactagtcataatccagctcatctctctctccctctctctttgttctctctttctctttctccaaaatggctctaaactacccttttttaacctacttcatactactgctagtaaccaacatatcccacaaactccatgatgaccctgaaaccatggcttcaagggactatggccatttaacgcatgaattcccattagctgtgtttcgtccatcttctatagatgacatagtcaccttgataaaatcttcgtacaatagctttgccccttttgacatagctgcgaggggccaaggccactccactcatggacaagccatggctcgtgatgggattgtggtggacatggccagcctaagaaaacaaagaaatggggttgcgattagtgtctctaaggaccctttgatgggtcactatgctgatgttggaggggaacaactctggattgatgtgctacatgccacacttgaatatggacttgcaccagtttcttggactgattatttgtacttgaccgtgggagggacactttctaatgctggaatcagtggccagagcttccgttatggacctcaaatcagcaacgttcatgaaatggatgtcatcactggtatggagttagttgttttttttaatcaataaatgttaatattattagcttgttagttttttttgaaaaaattgaattaactttcgtttcctcttttctttctttttttaaccacacaattaatctaataactactggtattaagttagtttattttccatttttcatatataagttaggatttctaattaaaattgacatttcgtaccaccactacaaaaaaataatgtatcagtggcacaaaaaaatatattggcatcacttgtttttttagtcattaatattttgtagcatcacaaaaaatatggtgacaagttttctaaaaattacaaattaactgattcgtcagtgatgttaatgattttttagtgcgtcttggcaactaatgttttcatcttatataaaattagaaacaatagcggcaacagcacctgacattgtgtttgtgttttgcgtgtttctatcgcctaatttttgttgagaacgtgttcgtgaaacttggaaaaagagaaaattgaaattttcttgagatatctaccacttaagaaaaacaaatggctgtttccgttttgtctcttatgacatgacatggtacgtcatagatgaagttctgctaaatatatttgatatgatttcttgaacacgttttatatattcccacttcccagttagtgtggttgttgaatctaattaaaacaggaatagtctttgtctacaatatgggtgagcgatgcaaactttccaagggtttagaagttagaactatataggtccacggtcataattttatattcttgattaactttatgttggttaagtcgttcatatttggtcaattcattcatatgagaaaatactgaaatacaaacatggaaaaatgttaattactcttataattggcgcatgcatgcatctaaattatatgattttaataaatagtttttgtcatctacttgatttcaggaaaaggagagttcgtaacatgctcttcacagaagaacttggagttattccacgcggttcttggaggcttgggacaatttggagttatagcaagggcgagaattgctcttgagccagcacccaaaagggtacgtttatagagaattgactagaattttgtcttgtagcttttcctccaccaattcatatagtgacacctaatcgaattgtcatttttttttacggtgaattgtcattttgtaaatctaccaagtggtagttggcacccatatatgtatgaactatagtaccatacatttcattttatgttggtgtgttagtcatccatgatgaacacatacacaaatgaaaataggacgagttatacgtacgtaagggtttgaatcactgaatgtggatttttgaagttgaaagcatattaatcttggtttgaaaaagaaaaaaaaaatcggaagtccctcttgaagttatcatgactcttatattaagccaatagaattagaaaaactataattatgaatgatcatgttaattctttcagtgacttaaaatcttatctacaaaaagtacccttttgaaaaagaccttcacttaagtccatgcatacagtactaatcttacatacttgagagttgagacttgaagcatgaggagatttgaagtctggagaaacaagccaccacatattaattactaccgtattcttatctttatttatccttccaattttgatgggactggttgcacatacattcatacatactaacatacataaatacgtctctctctcatgtatttcattttattatattctatttcgttagtaagtttactagtataagacattattaatggtgaatttttgttggcatgcaggttaagtgggtcagactactttatagtgacttttctgcttttaccaaagaccaggaacgattaatctcaatcaatggaaggaaacaaaagaacgcattggattttctggaagggatgctgctaatgaaccaaggccccataaataattggagatcctctttcttccctctatctgaccatcccagaatagcttctttaataactgaacatagcatcctctactgtcttgaagtggctaaatattatgacgaacaaaccgagttaaatgtggacaaggtaacctcgtctagtcatatctattatatatagttagatcttgtcacatttctttgtttaaaaaataaaataaaaggcacaatcccaaaaagtcaaaagcaaatgcctagatattgtgtgttttcttggatattaattattacaccttaataacccataataatttttttatttttctttgtctctgtaggaaattgaagttttgctccaaggactagcctatatccctggatttaattatgagaaaaatgtctcgtacgttgagttcttgaatagggtccgaagtggagagttgaaacttcagtcacaaggactgtgggaagttcctcacccgtggcttaatttgtttataccaaaatctcaaatcttggattttaattcaggagtattcaaagatatagttcttaaaagaaacatctcctctggaccagtcttggtttatcccatgaatagaaacaagtaagccttgaatgcatgaatcacaatctagtgtcattataattcaggagtgtgtgatgcaatcttttaattttctgaccattcaactcaatatcaattttatttcttttttcaattaaaatgcaaaagagaataataattaataatatgaaatttaattccaggtgggacgataggatgtcagcatctataccagacgaggatgttttctacacagttgggtttttgcactcaagtgggtttgatacttggaaggcatatgatgctcaaaacagagaaattttggagttctgtagagatgctggcatcatggtcaagcaatatcttcccaaccacagcacacaagaagattggacaaaccattttggtgctaaatggatgaaattcttagaaagaaaacatcagtttgatccaagaatgattctatcacctgggcaaaaaatcttccacaaaaaattacagccagtgttttaaatattttccctaataaaaaaagtaaaaatgttttgtggtgggactacctcaattagatggctagctagggacaggtgtacatacagtgtgaccaagaccaagatggcttttgtatgctaaagtttgcattgctagctagagaaattaataaggtggggcattaaaggctgcatgagtacttttggcacctattatgctacatattaccttagatacgttaggttgacaaagtcgtactggtaggtacaagaagcacagttgtctctcacactgtctgtcacccaacttgctatatagtgtgtggagaaattcggatcatattgaagatgctgtgagttatagtcctccaatattaaatgtttaacgattctgtctttctcttatataattttgttttgcattatattactttcgcactggtgcaaacatatatatcaatgattataattaatttatacaatgacgagtataattgtacccaagttgcatgccataatatttgtcaaaaacaaaaagttgtatgccataatcaatccaggttgctagataataagatagatatgaatatgataacataaaatgctattaaagcaacaaataaacaataacacatagtccttatagggttcataattgatcgatgaacctagctagacgttgattttaggttaatttccagcgaggataaaatttattatataaagaaataactaaccaacacaaaataataaaaaattaaaaaaaaacgaagaaacttattttagagatataatttgttttagtatttgattgtaatttgagagattagctaggctctcaccaagtgagatctagagtatattcttaagaaaatatttataataaagaacccttaaacattttgcaaaacaaagggtggaattaatattaacaacaataattataatatcttgaaaattttatgaaaataatatatatatatatatatatatagagagagagagagagagagagagaaaattctcacaaacaatttttatctgttatttcaaattggtgtatgactccttagtccttagttcatttgtttgcacccagtcctgtcttaggtagttgattttatagttaggtaaattaatttctcgcactcttcgcttgattgtcatttatgggttgaactgttgaagtgattttatattttttaataaatttcacctgcaaaaaaactcaccattagcatacgccccccccccccccccccccccctctcccaaaaaaaaaaaaaaaacgaaagaagattaattagaaagaataaggtcgtgaaatgatgttacaaataaggcatatcagaatcagacgcaagggaagaataaaaacgttacaacaattcgcgcacaatgcaccccaaaaaaaaaatgacaggcacacataccttaaggaagaagaatcaacgctttca

SEQ ID NO: 200 - DNA, 5752 bp, Artificial Sequence
  Synthetic polynucleotide
ataaatggtagaaatctgtgggttcaaatgttcaattgctggggatcttcgtgatcatgatgattcatacacaatctctagaaacacgtacgcaaatattaattaatcaatttcctttttatagtctcctcacaattcacatgaaacttcatactctattatccgattccatttccatcgtatctttgaatttgacatttgtttgcccaacatgtaattaactttcccttctcatcttaaagatgtaacatgatatatattataacttgtaattaacccaatatttttaactctctatttttacactcatctgacatgtatttttatttttcatttttttttcttatcacatcacctcttacgtgtacaatttttctctttttcttatttctgtcttccataatagtaattaatattcatcggtccgatatgtatacagcccaaaaaagtgtgtaaaatcatttttgtatttctaaccctctctttctcatgcaagctagcttcttctttctatttatagcccttctcccttcacccaccaacacaccacaactccaaactttttcctcttgttctcttcttcttcaacacaactagtcataatccagctcatctctctctccctctctctttgttctctctttctctttctccaaaatggctctaaactacccttttttaacctacttcatactactgctagtatattcactgtgggaaaaactgagcaatggaaagctccgattctaccagagcttgacattgataacatatcccacaaactccatgatgaccctgaaaccattcaaatggcttcaagggactatggccatttaacgcatgaattcccattagctgtgtttcgtccatcttctatagatgacatagtcaccttgataaaatcttcgtacaatagctttgccccttttgacatagctgcgaggggccaaggccactccactcatggacaagccatggctcgtgatgggattgtggtggacatggccagcctaagaaaacaaagaaatggggttgcgattagtgtctctaaggaccctttgatgggtcactatgctgatgttggaggggaacaactctggattgatgtgctacatgccacacttgaatatggacttgcaccagtttcttggactgattatttgtacttgaccgtgggagggacactttctaatgctggaatcagtggccagagcttccgttatggacctcaaatcagcaacgttcatgaaatggatgtcatcactggtatggagttagttgttttttttaatcaataaatgttaatattattagcttgttagttttttttgaaaaaattgaattaactttcgtttcctcttttctttctttttttaaccacacaattaatctaataactactggtattaagttagtttattttccatttttcatatataagttaggatttctaattaaaattgacatttcgtaccaccactacaaaaaaataatgtatcagtggcacaaaaaaatatattggcatcacttgtttttttagtcattaatattttgtagcatcacaaaaaatatggtgacaagttttctaaaaattacaaattaactgattcgtcagtgatgttaatgattttttagtgcgtcttggcaactaatgttttcatcttatataaaattagaaacaatagcggcaacagcacctgacattgtgtttgtgttttgcgtgtttctatcgcctaatttttgttgagaacgtgttcgtgaaacttggaaaaagagaaaattgaaattttcttgagatatctaccacttaagaaaaacaaatggctgtttccgttttgtctcttatgacatgacatggtacgtcatagatgaagttctgctaaatatatttgatatgatttcttgaacacgttttatatattcccacttcccagttagtgtggttgttgaatctaattaaaacaggaatagtctttgtctacaatatgggtgagcgatgcaaactttccaagggtttagaagttagaactatataggtccacggtcataattttatattcttgattaactttatgttggttaagtcgttcatatttggtcaattcattcatatgagaaaatactgaaatacaaacatggaaaaatgttaattactcttataattggcgcatgcatgcatctaaattatatgattttaataaatagtttttgtcatctacttgatttcaggaaaaggagagttcgtaacatgctcttcacagaagaacttggagttattccacgcggttcttggaggcttgggacaatttggagttatagcaagggcgagaattgctcttgagccagcacccaaaagggtacgtttatagagaattgactagaattttgtcttgtagcttttcctccaccaattcatatagtgacacctaatcgaattgtcatttttttttacggtgaattgtcattttgtaaatctaccaagtggtagttggcacccatatatgtatgaactatagtaccatacatttcattttatgttggtgtgttagtcatccatgatgaacacatacacaaatgaaaataggacgagttatacgtacgtaagggtttgaatcactgaatgtggatttttgaagttgaaagcatattaatcttggtttgaaaaagaaaaaaaaaatcggaagtccctcttgaagttatcatgactcttatattaagccaatagaattagaaaaactataattatgaatgatcatgttaattctttcagtgacttaaaatcttatctacaaaaagtacccttttgaaaaagaccttcacttaagtccatgcatacagtactaatcttacatacttgagagttgagacttgaagcatgaggagatttgaagtctggagaaacaagccaccacatattaattactaccgtattcttatctttatttatccttccaattttgatgggactggttgcacatacattcatacatactaacatacataaatacgtctctctctcatgtatttcattttattatattctatttcgttagtaagtttactagtataagacattattaatggtgaatttttgttggcatgcaggttaagtgggtcagactactttatagtgacttttctgcttttaccaaagaccaggaacgattaatctcaatcaatggaaggaaacaaaagaacgcattggattttctggaagggatgctgctaatgaaccaaggccccataaataattggagatcctctttcttccctctatctgaccatcccagaatagcttctttaataactgaacatagcatcctctactgtcttgaagtggctaaatattatgacgaacaaaccgagttaaatgtggacaaggtaacctcgtctagtcatatctattatatatagttagatcttgtcacatttctttgtttaaaaaataaaataaaaggcacaatcccaaaaagtcaaaagcaaatgcctagatattgtgtgttttcttggatattaattattacaccttaataacccataataatttttttatttttctttgtctctgtaggaaattgaagttttgctccaaggactagcctatatccctggatttaattatgagaaaaatgtctcgtacgttgagttcttgaatagggtccgaagtggagagttgaaacttcagtcacaaggactgtgggaagttcctcacccgtggcttaatttgtttataccaaaatctcaaatcttggattttaattcaggagtattcaaagatatagttcttaaaagaaacatctcctctggaccagtcttggtttatcccatgaatagaaacaagtaagccttgaatgcatgaatcacaatctagtgtcattataattcaggagtgtgtgatgcaatcttttaattttctgaccattcaactcaatatcaattttatttcttttttcaattaaaatgcaaaagagaataataattaataatatgaaatttaattccaggtgggacgataggatgtcagcatctataccagacgaggatgttttctacacagttgggtttttgcactcaagtgggtttgatacttggaaggcatatgatgctcaaaacagagaaattttggagttctgtagagatgctggcatcatggtcaagcaatatcttcccaaccacagcacacaagaagattggacaaaccattttggtgctaaatggatgaaattcttagaaagaaaacatcagtttgatccaagaatgattctatcacctgggcaaaaaatcttccacaaaaaattacagccagtgttttaaatattttccctaataaaaaaagtaaaaatgttttgtggtgggactacctcaattagatggctagctagggacaggtgtacatacagtgtgaccaagaccaagatggcttttgtatgctaaagtttgcattgctagctagagaaattaataaggtggggcattaaaggctgcatgagtacttttggcacctattatgctacatattaccttagatacgttaggttgacaaagtcgtactggtaggtacaagaagcacagttgtctctcacactgtctgtcacccaacttgctatatagtgtgtggagaaattcggatcatattgaagatgctgtgagttatagtcctccaatattaaatgtttaacgattctgtctttctcttatataattttgttttgcattatattactttcgcactggtgcaaacatatatatcaatgattataattaatttatacaatgacgagtataattgtacccaagttgcatgccataatatttgtcaaaaacaaaaagttgtatgccataatcaatccaggttgctagataataagatagatatgaatatgataacataaaatgctattaaagcaacaaataaacaataacacatagtccttatagggttcataattgatcgatgaacctagctagacgttgattttaggttaatttccagcgaggataaaatttattatataaagaaataactaaccaacacaaaataataaaaaattaaaaaaaaacgaagaaacttattttagagatataatttgttttagtatttgattgtaatttgagagattagctaggctctcaccaagtgagatctagagtatattcttaagaaaatatttataataaagaacccttaaacattttgcaaaacaaagggtggaattaatattaacaacaataattataatatcttgaaaattttatgaaaataatatatatatatatatatatatagagagagagagagagagagagagaaaattctcacaaacaatttttatctgttatttcaaattggtgtatgactccttagtccttagttcatttgtttgcacccagtcctgtcttaggtagttgattttatagttaggtaaattaatttctcgcactcttcgcttgattgtcatttatgggttgaactgttgaagtgattttatattttttaataaatttcacctgcaaaaaaactcaccattagcatacgccccccccccccccccccccccctctcccaaaaaaaaaaaaaaaacgaaagaagattaattagaaagaataaggtcgtgaaatgatgttacaaataaggcatatcagaatcagacgcaagggaagaataaaaacgttacaacaattcgcgcacaatgcaccccaaaaaaaaaatgacaggcacacataccttaaggaagaagaatcaacgctttca

SEQ ID NO: 201 - DNA, 7390 bp, Artificial Sequence
  Synthetic polynucleotide
ttaaatcggttcaaaattgttgaatcgatccaaaactagtaaatacagtaggttaattgatttcacttgaaatttaaaaaaaaaaaattaaaatgacgtcattttagtttttttttaaattattataacttatatgacatttttaagtgaagtttactttttattattattaatttatgcatactaggtttctgaaatattatattaaaatattatatatatatatatatatatatatatatatatatatatatatatatatatatatatatatatattattaaaatcaattccacttcgattgagctattaacttttgaaccaatatcttccccagttcaatgaccatccaagtctgaaaacattggttaccatcaacgttacccttccgtgaattggaaaagttaatgcaatataggttgatccaaggataagtcctatggtcccagaaagaaaatcttgagagatccttttgataattacccgagtttttactctctccttttaattcacgaaattggaaacttcaattgctaatataaaaagaattttgttagccaatatcatcagggtattgtcaaagaattacaagaaaaaaaaattataagataacataaaaaaataaaaaacaacataattttatatattttaataaaaaattcttttaatttttttttatcaatattctatagttactggcatttgacatgtaaaaatgtaaacatatgaattgataaaatttgaccaatgtttgaccctgagataggaatccaacggccccagttcaattgcaatcttttatttttactacgtgaaggcccaacaatggagaaccttgtggattttattgctgagaatctgtggttacgatgatgacacaccaacacaatcacagaaagcaagtaccgtttggaaggcctaacacttcattaattgcttcattaaatttattttactttctagctgctcaatttaattgctttacacaaatacttcatgacgtttcagaaggagggccaaatacaatctctacaatggttccatcgtatctttgaatttgacatttagcatccctccctttgcacaatgtacaatttgcattttgaatatttttttctcaccttcatatcgtgggactacttctataaccatcctggtgaaaataaataaagcgagggaattacgtaattaaacatatttaaatttctctctcctctgtttaattaatttatcaaaaacaaatatgtgtgcgagtatttaaaaatgtgtaaagtattattattttttaatttttcttttttccttctcatcaatgataaatatactttttaatataaaaatcaaacaataactataaaaaaaacatcttcacttcaattcaacattaaataaaaaataatccctgctttgttattttttacccaccaattatcatatttgttatttattatttttttatgttcttgctataaaggaaatcactatttgactcacacaaaactataaaggaatcaaataatcaattattatttaaaaactctattaaaataacaattacaacaaaatcccttatttttttcttccttatcattattaaaccttcccattctctctttctatctctacatgtttttctcaaattaaatattttctatatcctcctttatcatgcaaattaaagtcctcttccattctatatatagccgctacctcctccacctcctttccccactacaacacacaaacaccaacaaccaaatcaatccatccaccctagaaacaacaaagcactctctcttctctcattctattatcttctctcatcctcttattctctccaaaccaacaaaaaaaaaatggttgctgagaactacccttctcccacatacttcatcctccccataacacgtttgatctccacagtgggcaaaacctcccaatggacgaaggccctgtcgctgcctccggaactcgcctccgtctccctcgacgacaccatcttctgcaagctccgtgacgacccagaggccctccagggaagggcctccagggactacgggaacctcgtccgcgaggttcccttggcagtcttccacccagcctcagcgagcgacatcgcgaggctgatcaagctgtcgtacaacggctctgtccccttcaagattgcggcgagggggcaagggcactcgacaaggggccaggcgatggcacgtgagggggtggtggtggacatggcggggttcagagagagagggaatggagtggggataagggttgtgagtagtgtggaccctaataataagaatggttactactattatgcggatgttggaggggaacagttgtggatcgatgtgctacacgccacgctcgagcatggacttgcacctatgtcctggactgattacttgtacttgacgctgggagggactctctccaatgctggcatcagtggccagacattccgctatggtcctcaaatcaccactgtccgggaaatggacgtaatcaccggtaagaaaactttccattcaaccagttaacttacatgtttttagttttttagcttccaatatccaatagtttataacttgtaagcttcaattttatgttaatttataagctagttttaccctacttttgaaaattcaaggattttggtactacaataactcccttgtcaaactcgttcaattgttggcttagtatcaagtagactcttggatttttaggtgtactttaacaaccatgttaatttaattgatcagggttttaatattatggaaattggccattggacaacttggaatggaaggaaagcgggagatggaaagggaaaagaaattaattagaataattgttaatattagttgcgtgaaaaaaattaaatttgctgaattaaattatggttcatcacgactctatttgtggcaacaccaacgtgccgttttcagaacttcattgcaacagcggttatagtggcgtttattcaattcatattttaatgcatcagactgtgattgcgattgaaattttatgaaatcttgttttataaacttgttcttttgattaggaaacttgattctattttatatatatttaatgtaacgccgaattaatggttgataaacgagtctttgtctaaaattttggcgaatgttagcaagcgttttccacgtggtcccgtacgtgtttgaaaaattcttaatcatggaatcagttcacacgggcagtcatagactcatagactccaattcttgattaattgttttcttattaatattggtccatggtcttattttggtcaattctttttattaaaaataaacgggctgctgaattttaatttactcaagtgtttgttaatgaatatgtgtgcatgcatgcaattatatatatatatatatattactattatttatttgtgttttaatcaaattttggtttggttcaggaaagggagaatttgtgacttgctctcagcagacgaattcggagttgtttcacgcggttcttggaggcttaggacaatttggaattataacaagggcaagaattgctcttgcgccagctccgaagagggtacgtttaaaatcttcggaattgactaggacttgtcttgttgcttcttcctccaacatctctcatatagtaacgcaaatttctaaatatgttacattattaattcaaccaccaagctttgcggaagcatcaaatgtcgttgtcctgaaagcttcatgtcatcatttttcttggcacccatatacacacacatacgtttcacattgtgtcagtgcatattagtcatccatgaaagacacatgtacaaatgaaaacgagaggagttatattaaaatgtgtgttggaaaaatatatatcatattttcataagtcttaattttgaaattaatatacagtaaccctttgagaccttagcaattaagccaataaaaaggctcgtattaaccccaaccaacaactattagaaaatactaacaagtataggtgtatacataaatgattcatttgaattttagtaccttaattatttaactttatccttctatttgacgggactcgttgcataagccatacatacataatcatgcgttcattattgtttttcattatgagttaatgagttgattgtatgaactaatggtgaatttttgttggcaggttaaatgggtgagacttttgtacaatgacttttctgcttttaccaaagaccaggaacaactaatatctatcactggaaggaaacaaaatgtttcactggattatttggaaggattgctgctaatgcaccaaggacccataaataattggagatcttctttcttccctttagccgaccatgcccgaataatttcgctagtaactaaacacagcgtcctctattgcctagaagttgccaaatattatgatggccaaaatgaaaacaatgtggacaaggtaccatctccattcatgtgcatttgccttgatgatgtttcttctattttttcttttaatgttttgatctcaccttatataataaccctttatcacactcaatcttgttatatttttaagagtttaatgataatattatgattttgttgtgaaaaaagagagtttaattgttattatataatcacaaattatcattaatatgacttttaaaataattaataatataaaaattaataaatttatcgtatttaatgagttataattaaatgatcatataaaattattttatattattaacatatagtttttttttctatttttaatatttgttttactataagttgttatattttcaatcttttttctagtataagttttaataatcaatattgtaagtaatattctcatttttcatgttgtgtaggaactccaagttttactacaaggattgagctatatccctggattttactatgaaaaagatgtctcatattttgagttcttgaatagagtccgaagtggagagttgaagctacagtcacaaggactatgggatgttcctcacccgtggcttaatttgtttataccgaaatctcaaatcatggaatttgactcgggcgtgttcaagaatatcatccttaaacgaaacatcaccacaggacctgtcttggtttaccccatgaatagaaacaagtaattgagcttaactaactaatctcaacttatgttgttatcattaggaaaaatgttaattggtacgaaaactatatataccactattttcatttaaattcatgaaagtgaaatttctctttcctaaaacaaattctttctcttaaaatgaatttttgtttttctcaatctccatcaattacttatttccttttttgaatgtttgaaaagtcattcacaacattttcttcataaaagggttattcgtaccaatttaaatagaattgccgttattatcagatgtacaattcttctcttcactcacttcttttccattaaaattgtaaaaaaaaaataaaaaaatcaggtgggacaataggatgtcagcatcaatacccgatgaggatatcttctacacagttggatttttgcattcaagtgggtttgataattggaaggcctatgatgctcaaaataaagaaattctacaattttgtaacgttgctgggatcaaggttaagcaatatcttccccactatcgcacacaagaagattgggcaaaccattttggccctaaatggaggacttttgtagaaagaaaacaccagtttgatccaagaatgattctatcacctggacaaagaatctttaacaattaaaatagctttaaaaatatatattcccccccccccccccccccccaaaaaaaaaaaaattatataatatggtgggactacccaagttagctagctggctgatcacaagtgtgcacataggacccagaattcagatgatagcctttgtacttgtttttgttaagagggtggggttaaaagctgcatgactttggcatatatgtagatcaggttacacatactttagatacgttaggttgacaaaatcatgtgtgaaataagatgcacacagctagctgtgtacctttctttctctctgtccctcaatttgtctatcactaaaaagatttctatatagtttagaacctagtgaagagaaagaaaaaaccattatattgaggatttaattttatcacgttctaatcctatacattaatattcttaaatgtgcaatgagtgtgctcggtgccttaatgattctttatctttgttaattgttatattgtagggttttgtttttgccttcctaattttgtaacaggggcacccctagcaataattgagatcctaggttaactaaggaacagcattattgtgtctaaattgagattcctagctgtatgccataataataaatcatcgtaggttgctagatagatgtgatagcgccaaatgccttccaatactataatctccattgcaagatccttcgttgtgattgtgtagaaaagattacgctgctttacaagagaatactccaagaaagcaagtgattgctccttaatataaagaatcatgcaataaacaaatggtgtcgtaatccataaagtgtatttaatatttgatgaaagagtagtgtagacatcaaacaaaataaagtttgatgcaattcgaattatagatacttgattaatctctaaattatgttgagacaatcatatttgaatttgataagactattatgaacgataaaaaatattataaataataaaaaaatttcatcaaacatttaatacaattatataccttactcaaatttgaaaacctgtacatataggaaaaaaacctttactaaaagaggttaaactcaccatacggatttttatatgtcgaagggatctttaattgtccatcggaaaacatcctaattcataaaaaaggaaagaaagtttagacatgaataattacggaccaatgaatgcaacctacgtctctcaattttaaggagaatttaggaatattatagtatatcactgaaagtacacacaagtggcaatgatgaatattttaatttaaagttttaattggattcgaaattaatcccttcttttttccagaaaaaataataatcatcgagtaatcaagacaatttcccaagtagacaacaagaatacaaaagagaatacgtgacttcgtttcaccatagaaaagaaggaatgcaataacgatgataataattataaaatgaaattgacaaaatatctaaatgcctgtagatatttctacagcgaatgataagtgtttttccattaaaaataagtttcttttgttaagaatttctaacatttttagttccaaaatataggaatgaagccaataagtaagtaagaatttctaacgtctgaaag

SEQ ID NO: 202 - DNA, 8271 bp, Artificial Sequence
  Synthetic polynucleotide
ctacttctagaatgacaactactcctatggcaatatcaattgttagcggtggttcccttaagttcgagactaagggcagtctccaaaaggaagaaaggaaataacaaacttaagcctgaatgttctacgttttatttagtgtctcttgatatttaaaggtctatcaaatatgtataataaccgcacttccactataataaccacactcccactacgataatcgctacaataaccaccacaataactacttctaggatgacaactacctctatataagtttccatgacagaacatcttcttcctaacaccttacctatcacaaatgcttctcctctcggtgtcagagagtactattgattccctaagttctgacggtgtctttttctaaccaaagatccacttttcgaaggtcccgagccaattcgatgagagctcggaggcatagaactcggtttagtcacttatgccatgcttcatttcgtcgcgcgtactttaccaatcaacacacgccatcgagattgatctgcaagtgcagattacgtaagcgagaaaggatttgcaatggaattcacaaatcgcacaatcagagaacaggataagtgtactgctaattatgagcgccagggagtgtagattcatgtcttaggttttaaaattagaacagaataaatatgaaaattgttttttactttctatattttatattttaatttttttttagtttttattattagtaatattgttaattataattaattataaaaattttaacaagtaatttattactaatttatcataagataatttataataaaaaaataattgataatttataattaatttataactaattatttttatattttgtttagtaaagactaaaaggtaattaaaatgtaaattatagagattaaaatatcatttttaaactataagaactaaaaaagaattaaaatacaaactataagacaaaaaagatcacttttaaactataggaactaaaaaaattacttttaaattatatggactaaaaaataccaatcgtaaaattataggaactaaataaataatataaccttaaattttttattttaagatcaattttttaaaaaattaatgttaatcatgatattttatttataaaatatcaaaactcattttgtaaaatggattttcatcaaaataaacgttcactttgctatggtaaatcttgttttgtagtattttggttgttctgacccaaatgacccaaatgcaggctagtggacaatgacattgattgttttgtatatgggttgggtgtcccttgtatcctattgatatattccttttgccttattaagaaaaattgcattagaaactactatatattaaatgctctaacaattaatgattaaattgacaccacatcctgtttgactctccacttttcttttattggtactctctattttagtctgctctttatatacatgttaacttaaagacagcaaatttaccaaagtaacttatcttctctcttgaaagaaaaatgccacagaggaatttagtactattttccacaactatggttgtgctattgctatctagcatagtgctcacacaagcacaaccacgatcatggtcagcattccaagcatccaaagaactagccacaaagcttagtcgtaaccctcaaacctttccacatgcctcaaccgggcacatagttcacaaaaccccagtggcaattttcaatccatcttctgttagtgacatcttggccttgatacatttctcaaactctcttcctaacccattccccatagcccctagagggaaagcacactctgttcatggacaagccatgacaaaagatggggtggtgttgaatatgactaacctcaatagcagttttcaaaatgggttaggggttttggtgtctgcttgtgatggaaaaggtccattgatttgttatgctgatgtaggtggtggccaaatgtggatcgatgtcttgcatgcatcccttgaacgtggactcacacctttgtctttgactgattatatgtatgccactgttgggggcacactatctaatgctggcatgggtggcatgtcctttcgatttggacctcagatctctaatgttcttgaattggatgttattacaggtatgactcactcaattttatcaattaattttcttccatactcatctacacgcttgttcgaagtgaaacatttaactgaattttttttatcttggatatcacaattgtgtaatttttcgtctagatttgtgattatgttaattcaatctgtatatcttaataattatattaaagtccctccctccttcaattatctgtcaaatatttaacgaaatatatttatgtgacatttgagaatgttgatgggtttatatgtgttattttagtcgattagattttacgtgtgaagttttagtgtctcccaaattcttattaacattgtgggaaaaaatgagaaaacaatcgcagaactggagtttgattccagattattattattatttagtaattttattattatctatatcataatagtatatttattaactcatttaatatcatatttattacatatatttagtgtaataatagtatatttattacattctttttacatacaaaaagtcagaaagacttaaaagcttctacaaaaagaaatacctgttatatcagctcttaaagaattacatatgaaatcctacgcatttattacacacacacaaatatatatatatatatatacttaaacagaaatatgaattgttattatatttataattagtatttatattaatagaacaatttatagtttatactatggaataaatttttaaatataaatttattatttatattgatatactcatttatagtttttactaagatataagtttataaatataaatttgcacctcttgtgattttgaactggttttttaataaataaaaaataaataaaaagattataaatataaattattattacattaacataataatttacatttattaatttaatactaaatatatatagtaaatgtatcattaaatgaatgtagtaaacatattattaattttcagaaaagttttaatactttttcaccctagaaatatacaaattttttttaattgatataatttttttttgtttatgattcttgtattaatatttaaaccttccgttggagattaacgggtaaaaaatacaaggtttaaacattatataagtaaagttttcttacaacgacaaaacaaaactaattaatatatttacagctaatgatgtttgtttaaaaagtgctaattatatttttttgttctagtcaatgttgtatagttacccaacatataatcagtgacggactttttagttgtggggaaatattcattatatatatatatatatatatgaatcggtgctgcatataatacaatatatacaattttacactgaaaactgtatattattaaaatttatcaggaattatgcttaaatatcttattgtatctatcttattaaagaaatctaattatatctataaaataaaggtttatttcgatcgttttgatatattgtaaatattattttttttgtttgtttttctcgtataaactttaatacatctatatatgtggcttttatatatagggaaaggagaccttgtgacttgctccaaggagcagaactcagaggcattttacgctgctcttggaggattaggtcaatttggggtgataacaagagcaagaatacctctaggacctgcacctactagggcaagtattagtttcccctttcatatagatttcgtaagggtgaaaataaaaataatattttataggactaaaattaaactaatttcatataaacctaaattaaaactcactcaaattatagatgtattaaaatcatatttaatctatatatatgccatttaattttaattgaaacatacatattatatatagatcattttttcctgtaaacttagtcttagacactatacaacttcaatactattaaaattgtaccaaaattaactatcttaaaactaaaaatgagaataagtcgggtaattgacataagtctatgagctcacttgtttaaagcttggtctcatctatctaataaaaaaagttaaacttaaactttttaaaaagtctatttatttatataatttagacttggacttgtgaaaaaacttattaaactgtatagaccggtctaattattcatttaaatatagtaaaacattaaaatatattatacttttattttaatatcttaatatgttaatatatttttatcataaataaaatgaatatttgaaataaatagatctttaaatatgtaataagctaaactatatcatatcttaatttttataacatgccatacctatatatttatataacgtctaacttgacctaacatattatcacccctacttaaaaattatttatctatttatttttaacaaagtttttttcatgtgggtgtttgcaggtaaaatggctccgcctgctatacaacaacttcactgcattttcaagagaccaagaacatttaatatcgttcagtgaaaggaatgacattgctacagcagattatgtagaaggcatgcttctattgaatcagccgccactggatcttctcttttatccagcttctgatcatcaaagggtaacttccttggtaactcaatatggcattatctacatcttggagcttgccaaatactattacaataactctcaggcacatgtcaatgaggtaacttgaaataaaagttgtttttagcatctagttagaaacttcttttatttttattcttatttttttatggacaacatatataatgaatttagtaaagaaatacagagatattctaattgttatatattcatcatacatcaaagatcaaattaatcctcctgattgaaaagaattttgttttcatgaatccaaaagaaacatgtctcaaactcactcaaattgtatggaacccatatattaattaatttatgtacaattcattgttttttactaaattgattatttttcttgtttcttaaataggaagttgcatatttgctgaaagggttaaactttgtacatacatttgtgttcgaaagagatgtgtcatacgaggagtttgtgaacagagtttatcctttggagcaaatgcttaggtcagaaggactttgggaagttcctcacccttggctgaacctctgggttccaagatctagaatctcagattttgatgaaggtgttttcaaggacattgttcttaagcaaaatattactggcggaagttttctagtctacccaacaaacagaagaaacaagtaaattgattagattatttatttttttgtgagtgtcaaattattatctagatcacccgtctcctttaatttacatatcctttctagtgtttccaatatataaaaaaatgacacctcactaaaaaaaataacaaataagagaatttattgttttttaaccacatttttttattgagagaaaacactccacaagaaaaataataataacaacaaaataatttatgtaatttttaaaagaaaaggtcacttaaatttttgcaactctaaaattagttattgaaaaaaaaaacctcaagtctcacatttactagaggaacctcctaagttttttctaaaatgaatatatttctaaaggatatgagacttaaagttttttcaatattaatttacaacattgtgctctgattcaaagtcaagcaatctcctagaataaaagagattgaaaatagcactaacactattggtggggtttgtggtttgtggtctgtggatttaaatttggcatgtggtatttaacagaacttcaacagaggtataaattataaaagatttttttttctgagaaaaagaaataaatggaggtatgttattaaaagagggagtatgaataacaactgtcctaataatactccattgggcctgacagtaggagttgggccataacaattagggacaaaaaataattttggttactaaatttagtcaataattccttttcttagtcacattagatgtttctgttccaatttatttgcttatgtaaatgacttaatttatacatatgtgaggattaaattgaatcaacattatgcttcacaggtgggatgataggatgacaccaattacacctgacgaagatgttttctacgttgtagattttttgcgtgttgctaaaacgtttgatgtggtggacaaactacaggttcaaaacaaacagatactgcggttttgtaatgatgctggtattaagatcacagagtatcttatcgggaacaaaactcatcaacaatgggtggaacactttggcccaaaatggaaactttttgcagatagaaaaactgaatttgatcccaaaaaaatattgtcacctggacatgggattttccagtaaataatgtgctaggtttcagtgaaatctctcattttggaaattcatgaaataaaaatgaaattctgtaccagaaaaaaaaaaaaaaacttgttgtgtaattctgtgccaaacatacattgaattggattgaagttattatgcaattttgtacgaaaaaaaacttatgtatttgattattttatgtttttttattaatgttgaatgttcaaatattctcatgactcacgaacaacggcagatctagaagaaaaaaatggtcgtaagatgtgttgatggtatttaaatgaatgcatgtctacttcaaaatttatttgatagactcatttcgtaaaaaaaaaaaatagaaataacctatttaacaatacttgtttggaaaataaatttaaaaataagaaatttggtcgtttttttatatagaaaatagcattgtttttatgatattttaatgcaattcacgattttatgttgttgggtttttaaataaataaaagttacataaaactttagttttaaattttctttgggactgtgaatggagttaaactctaaaaaagatctataattccaaagtcaggttaccatcaaatattgacatatagcaaaaaaaaaaactactcccttgggaaaattatataaaatattaccttgtcaagagacttgcatttatacaaatgatttatttagcaaaattgttgcatcatgatcaaataggacaaacgttgctaaatcaatgtcactaggcattggcacccttacaagttacaagatacctttaagaaatcgaaaactatttttttcaaaccctttgttttgtgaattaactctttatgagctattttatccctctcaatcggaatataaagagatttttccttacatgacactagtggtctgatcctaagtttgagcttgctcgatgataagcaatgattttaagttttgggtgagaatatataaaaacattggttggagcgttttttgtttttatttttaaagaaaataaaaaataagaatgaaaatatatttatttaaaatttagaaaatattttttctgaatatatttttgaaatagaccaaaaactgaaaataataaatcaacattttcagtcttgtttgaaaaggtgaaaacagcgtggtaccttagagtgctttcttcttaatacattttttttaatcttaaaaatttgaaaatgaaaataaaaaataaacgctcaaatcaagctccacctaaatttttctctattgcaaatgttgaaaaaaatggaaaagcaaaagatctcaaagtaaaataaatatattgtcttttgttacattttgtttcaatgattgtggggaataattgaggtaggataagtggtaggaaaaaatatcaagcaacggataatggtaattgttttatataaaggtttaaatatatttttagtcttttaatttaaaattattattattttttagtccttaaaaacaaatatgcaaattttagtaatctaaaattttaaaatctagttttagtcttgttttgttaactctataacagaggttgtctgtgtggaaaatgatgtgcaattttgtggcgatttctttagtgtgaaaattttgttttaaatttaaatcaaacaaaatgtctcgcaaggcaacaataacgttgttgctgctaacaatcttcgtgtggcaaaatcaacagtggagaaaacgactatcaacaatgttagagaagagttgacgaaggaaaatggggaaaataggacaaacccgaacaaaaaaaccacccttgacttg

SEQ ID NO: 203 - DNA, 8266 bp, Artificial Sequence
  Synthetic polynucleotide
ctacttctagaatgacaactactcctatggcaatatcaattgttagcggtggttcccttaagttcgagactaagggcagtctccaaaaggaagaaaggaaataacaaacttaagcctgaatgttctacgttttatttagtgtctcttgatatttaaaggtctatcaaatatgtataataaccgcacttccactataataaccacactcccactacgataatcgctacaataaccaccacaataactacttctaggatgacaactacctctatataagtttccatgacagaacatcttcttcctaacaccttacctatcacaaatgcttctcctctcggtgtcagagagtactattgattccctaagttctgacggtgtctttttctaaccaaagatccacttttcgaaggtcccgagccaattcgatgagagctcggaggcatagaactcggtttagtcacttatgccatgcttcatttcgtcgcgcgtactttaccaatcaacacacgccatcgagattgatctgcaagtgcagattacgtaagcgagaaaggatttgcaatggaattcacaaatcgcacaatcagagaacaggataagtgtactgctaattatgagcgccagggagtgtagattcatgtcttaggttttaaaattagaacagaataaatatgaaaattgttttttactttctatattttatattttaatttttttttagtttttattattagtaatattgttaattataattaattataaaaattttaacaagtaatttattactaatttatcataagataatttataataaaaaaataattgataatttataattaatttataactaattatttttatattttgtttagtaaagactaaaaggtaattaaaatgtaaattatagagattaaaatatcatttttaaactataagaactaaaaaagaattaaaatacaaactataagacaaaaaagatcacttttaaactataggaactaaaaaaattacttttaaattatatggactaaaaaataccaatcgtaaaattataggaactaaataaataatataaccttaaattttttattttaagatcaattttttaaaaaattaatgttaatcatgatattttatttataaaatatcaaaactcattttgtaaaatggattttcatcaaaataaacgttcactttgctatggtaaatcttgttttgtagtattttggttgttctgacccaaatgacccaaatgcaggctagtggacaatgacattgattgttttgtatatgggttgggtgtcccttgtatcctattgatatattccttttgccttattaagaaaaattgcattagaaactactatatattaaatgctctaacaattaatgattaaattgacaccacatcctgtttgactctccacttttcttttattggtactctctattttagtctgctctttatatacatgttaacttaaagacagcaaatttaccaaagtaacttatcttctctcttgaaagaaaaatgccacagaggaatttagtactattttccagtgctattgctatctagcatagtgctcacacaagcacaaccacgatcatggtcagcattccaagcatccaaagaactagccacaaagcttagtcgtaaccctcaaacctttccacatgcctcaaccgattatgggcacatagttcacaaaaccccagtggcaattttcaatccatcttctgttagtgacatcttggccttgatacatttctcaaactctcttcctaacccattccccatagcccctagagggaaagcacactctgttcatggacaagccatgacaaaagatggggtggtgttgaatatgactaacctcaatagcagttttcaaaatgggttaggggttttggtgtctgcttgtgatggaaaaggtccattgatttgttatgctgatgtaggtggtggccaaatgtggatcgatgtcttgcatgcatcccttgaacgtggactcacacctttgtctttgactgattatatgtatgccactgttgggggcacactatctaatgctggcatgggtggcatgtcctttcgatttggacctcagatctctaatgttcttgaattggatgttattacaggtatgactcactcaattttatcaattaattttcttccatactcatctacacgcttgttcgaagtgaaacatttaactgaattttttttatcttggatatcacaattgtgtaatttttcgtctagatttgtgattatgttaattcaatctgtatatcttaataattatattaaagtccctccctccttcaattatctgtcaaatatttaacgaaatatatttatgtgacatttgagaatgttgatgggtttatatgtgttattttagtcgattagattttacgtgtgaagttttagtgtctcccaaattcttattaacattgtgggaaaaaatgagaaaacaatcgcagaactggagtttgattccagattattattattatttagtaattttattattatctatatcataatagtatatttattaactcatttaatatcatatttattacatatatttagtgtaataatagtatatttattacattctttttacatacaaaaagtcagaaagacttaaaagcttctacaaaaagaaatacctgttatatcagctcttaaagaattacatatgaaatcctacgcatttattacacacacacaaatatatatatatatatatacttaaacagaaatatgaattgttattatatttataattagtatttatattaatagaacaatttatagtttatactatggaataaatttttaaatataaatttattatttatattgatatactcatttatagtttttactaagatataagtttataaatataaatttgcacctcttgtgattttgaactggttttttaataaataaaaaataaataaaaagattataaatataaattattattacattaacataataatttacatttattaatttaatactaaatatatatagtaaatgtatcattaaatgaatgtagtaaacatattattaattttcagaaaagttttaatactttttcaccctagaaatatacaaattttttttaattgatataatttttttttgtttatgattcttgtattaatatttaaaccttccgttggagattaacgggtaaaaaatacaaggtttaaacattatataagtaaagttttcttacaacgacaaaacaaaactaattaatatatttacagctaatgatgtttgtttaaaaagtgctaattatatttttttgttctagtcaatgttgtatagttacccaacatataatcagtgacggactttttagttgtggggaaatattcattatatatatatatatatatatgaatcggtgctgcatataatacaatatatacaattttacactgaaaactgtatattattaaaatttatcaggaattatgcttaaatatcttattgtatctatcttattaaagaaatctaattatatctataaaataaaggtttatttcgatcgttttgatatattgtaaatattattttttttgtttgtttttctcgtataaactttaatacatctatatatgtggcttttatatatagggaaaggagaccttgtgacttgctccaaggagcagaactcagaggcattttacgctgctcttggaggattaggtcaatttggggtgataacaagagcaagaatacctctaggacctgcacctactagggcaagtattagtttcccctttcatatagatttcgtaagggtgaaaataaaaataatattttataggactaaaattaaactaatttcatataaacctaaattaaaactcactcaaattatagatgtattaaaatcatatttaatctatatatatgccatttaattttaattgaaacatacatattatatatagatcattttttcctgtaaacttagtcttagacactatacaacttcaatactattaaaattgtaccaaaattaactatcttaaaactaaaaatgagaataagtcgggtaattgacataagtctatgagctcacttgtttaaagcttggtctcatctatctaataaaaaaagttaaacttaaactttttaaaaagtctatttatttatataatttagacttggacttgtgaaaaaacttattaaactgtatagaccggtctaattattcatttaaatatagtaaaacattaaaatatattatacttttattttaatatcttaatatgttaatatatttttatcataaataaaatgaatatttgaaataaatagatctttaaatatgtaataagctaaactatatcatatcttaatttttataacatgccatacctatatatttatataacgtctaacttgacctaacatattatcacccctacttaaaaattatttatctatttatttttaacaaagtttttttcatgtgggtgtttgcaggtaaaatggctccgcctgctatacaacaacttcactgcattttcaagagaccaagaacatttaatatcgttcagtgaaaggaatgacattgctacagcagattatgtagaaggcatgcttctattgaatcagccgccactggatcttctcttttatccagcttctgatcatcaaagggtaacttccttggtaactcaatatggcattatctacatcttggagcttgccaaatactattacaataactctcaggcacatgtcaatgaggtaacttgaaataaaagttgtttttagcatctagttagaaacttcttttatttttattcttatttttttatggacaacatatataatgaatttagtaaagaaatacagagatattctaattgttatatattcatcatacatcaaagatcaaattaatcctcctgattgaaaagaattttgttttcatgaatccaaaagaaacatgtctcaaactcactcaaattgtatggaacccatatattaattaatttatgtacaattcattgttttttactaaattgattatttttcttgtttcttaaataggaagttgcatatttgctgaaagggttaaactttgtacatacatttgtgttcgaaagagatgtgtcatacgaggagtttgtgaacagagtttatcctttggagcaaatgcttaggtcagaaggactttgggaagttcctcacccttggctgaacctctgggttccaagatctagaatctcagattttgatgaaggtgttttcaaggacattgttcttaagcaaaatattactggcggaagttttctagtctacccaacaaacagaagaaacaagtaaattgattagattatttatttttttgtgagtgtcaaattattatctagatcacccgtctcctttaatttacatatcctttctagtgtttccaatatataaaaaaatgacacctcactaaaaaaaataacaaataagagaatttattgttttttaaccacatttttttattgagagaaaacactccacaagaaaaataataataacaacaaaataatttatgtaatttttaaaagaaaaggtcacttaaatttttgcaactctaaaattagttattgaaaaaaaaaacctcaagtctcacatttactagaggaacctcctaagttttttctaaaatgaatatatttctaaaggatatgagacttaaagttttttcaatattaatttacaacattgtgctctgattcaaagtcaagcaatctcctagaataaaagagattgaaaatagcactaacactattggtggggtttgtggtttgtggtctgtggatttaaatttggcatgtggtatttaacagaacttcaacagaggtataaattataaaagatttttttttctgagaaaaagaaataaatggaggtatgttattaaaagagggagtatgaataacaactgtcctaataatactccattgggcctgacagtaggagttgggccataacaattagggacaaaaaataattttggttactaaatttagtcaataattccttttcttagtcacattagatgtttctgttccaatttatttgcttatgtaaatgacttaatttatacatatgtgaggattaaattgaatcaacattatgcttcacaggtgggatgataggatgacaccaattacacctgacgaagatgttttctacgttgtagattttttgcgtgttgctaaaacgtttgatgtggtggacaaactacaggttcaaaacaaacagatactgcggttttgtaatgatgctggtattaagatcacagagtatcttatcgggaacaaaactcatcaacaatgggtggaacactttggcccaaaatggaaactttttgcagatagaaaaactgaatttgatcccaaaaaaatattgtcacctggacatgggattttccagtaaataatgtgctaggtttcagtgaaatctctcattttggaaattcatgaaataaaaatgaaattctgtaccagaaaaaaaaaaaaaaacttgttgtgtaattctgtgccaaacatacattgaattggattgaagttattatgcaattttgtacgaaaaaaaacttatgtatttgattattttatgtttttttattaatgttgaatgttcaaatattctcatgactcacgaacaacggcagatctagaagaaaaaaatggtcgtaagatgtgttgatggtatttaaatgaatgcatgtctacttcaaaatttatttgatagactcatttcgtaaaaaaaaaaaatagaaataacctatttaacaatacttgtttggaaaataaatttaaaaataagaaatttggtcgtttttttatatagaaaatagcattgtttttatgatattttaatgcaattcacgattttatgttgttgggtttttaaataaataaaagttacataaaactttagttttaaattttctttgggactgtgaatggagttaaactctaaaaaagatctataattccaaagtcaggttaccatcaaatattgacatatagcaaaaaaaaaaactactcccttgggaaaattatataaaatattaccttgtcaagagacttgcatttatacaaatgatttatttagcaaaattgttgcatcatgatcaaataggacaaacgttgctaaatcaatgtcactaggcattggcacccttacaagttacaagatacctttaagaaatcgaaaactatttttttcaaaccctttgttttgtgaattaactctttatgagctattttatccctctcaatcggaatataaagagatttttccttacatgacactagtggtctgatcctaagtttgagcttgctcgatgataagcaatgattttaagttttgggtgagaatatataaaaacattggttggagcgttttttgtttttatttttaaagaaaataaaaaataagaatgaaaatatatttatttaaaatttagaaaatattttttctgaatatatttttgaaatagaccaaaaactgaaaataataaatcaacattttcagtcttgtttgaaaaggtgaaaacagcgtggtaccttagagtgctttcttcttaatacattttttttaatcttaaaaatttgaaaatgaaaataaaaaataaacgctcaaatcaagctccacctaaatttttctctattgcaaatgttgaaaaaaatggaaaagcaaaagatctcaaagtaaaataaatatattgtcttttgttacattttgtttcaatgattgtggggaataattgaggtaggataagtggtaggaaaaaatatcaagcaacggataatggtaattgttttatataaaggtttaaatatatttttagtcttttaatttaaaattattattattttttagtccttaaaaacaaatatgcaaattttagtaatctaaaattttaaaatctagttttagtcttgttttgttaactctataacagaggttgtctgtgtggaaaatgatgtgcaattttgtggcgatttctttagtgtgaaaattttgttttaaatttaaatcaaacaaaatgtctcgcaaggcaacaataacgttgttgctgctaacaatcttcgtgtggcaaaatcaacagtggagaaaacgactatcaacaatgttagagaagagttgacgaaggaaaatggggaaaataggacaaacccgaacaaaaaaaccacccttgacttg

SEQ ID NO: 204 - DNA, 5702 bp, Artificial Sequence
  Synthetic polynucleotide
ataaatggtagaaatctgtgggttcaaatgttcaattgctggggatcttcgtgatcatgatgattcatacacaatctctagaaacacgtacgcaaatattaattaatcaatttcctttttatagtctcctcacaattcacatgaaacttcatactctattatccgattccatttccatcgtatctttgaatttgacatttgtttgcccaacatgtaattaactttcccttctcatcttaaagatgtaacatgatatatattataacttgtaattaacccaatatttttaactctctatttttacactcatctgacatgtatttttatttttcatttttttttcttatcacatcacctcttacgtgtacaatttttctctttttcttatttctgtcttccataatagtaattaatattcatcggtccgatatgtatacagcccaaaaaagtgtgtaaaatcatttttgtatttctaaccctctctttctcatgcaagctagcttcttctttctatttatagcccttctcccttcacccaccaacacaccacaactccaaactttttcctcttgttctcttcttcttcaacacaactagtcataatccagctcatctctctctccctctctctttgttctctctttctctttctccaaaatggctctaaactacccttttttaacctacttcatactactgctagtaaccataattgataacatatcccacaaactccatgatgaccctgaaaccattcaaatggcttcaagggactatggccatttaacgcatgaattcccattagctgtgtttcgtccatcttctatagatgacatagtcaccttgataaaatcttcgtacaatagctttgccccttttgacatagctgcgaggggccaaggccactccactcatggacaagccatggctcgtgatgggattgtggtggacatggccagcctaagaaaacaaagaaatggggttgcgattagtgtctctaaggaccctttgatgggtcactatgctgatgttggaggggaacaactctggattgatgtgctacatgccacacttgaatatggacttgcaccagtttcttggactgattatttgtacttgaccgtgggagggacactttctaatgctggaatcagtggccagagcttccgttatggacctcaaatcagcaacgttcatgaaatggatgtcatcactggtatggagttagttgttttttttaatcaataaatgttaatattattagcttgttagttttttttgaaaaaattgaattaactttcgtttcctcttttctttctttttttaaccacacaattaatctaataactactggtattaagttagtttattttccatttttcatatataagttaggatttctaattaaaattgacatttcgtaccaccactacaaaaaaataatgtatcagtggcacaaaaaaatatattggcatcacttgtttttttagtcattaatattttgtagcatcacaaaaaatatggtgacaagttttctaaaaattacaaattaactgattcgtcagtgatgttaatgattttttagtgcgtcttggcaactaatgttttcatcttatataaaattagaaacaatagcggcaacagcacctgacattgtgtttgtgttttgcgtgtttctatcgcctaatttttgttgagaacgtgttcgtgaaacttggaaaaagagaaaattgaaattttcttgagatatctaccacttaagaaaaacaaatggctgtttccgttttgtctcttatgacatgacatggtacgtcatagatgaagttctgctaaatatatttgatatgatttcttgaacacgttttatatattcccacttcccagttagtgtggttgttgaatctaattaaaacaggaatagtctttgtctacaatatgggtgagcgatgcaaactttccaagggtttagaagttagaactatataggtccacggtcataattttatattcttgattaactttatgttggttaagtcgttcatatttggtcaattcattcatatgagaaaatactgaaatacaaacatggaaaaatgttaattactcttataattggcgcatgcatgcatctaaattatatgattttaataaatagtttttgtcatctacttgatttcaggaaaaggagagttcgtaacatgctcttcacagaagaacttggagttattccacgcggttcttggaggcttgggacaatttggagttatagcaagggcgagaattgctcttgagccagcacccaaaagggtacgtttatagagaattgactagaattttgtcttgtagcttttcctccaccaattcatatagtgacacctaatcgaattgtcatttttttttacggtgaattgtcattttgtaaatctaccaagtggtagttggcacccatatatgtatgaactatagtaccatacatttcattttatgttggtgtgttagtcatccatgatgaacacatacacaaatgaaaataggacgagttatacgtacgtaagggtttgaatcactgaatgtggatttttgaagttgaaagcatattaatcttggtttgaaaaagaaaaaaaaaatcggaagtccctcttgaagttatcatgactcttatattaagccaatagaattagaaaaactataattatgaatgatcatgttaattctttcagtgacttaaaatcttatctacaaaaagtacccttttgaaaaagaccttcacttaagtccatgcatacagtactaatcttacatacttgagagttgagacttgaagcatgaggagatttgaagtctggagaaacaagccaccacatattaattactaccgtattcttatctttatttatccttccaattttgatgggactggttgcacatacattcatacatactaacatacataaatacgtctctctctcatgtatttcattttattatattctatttcgttagtaagtttactagtataagacattattaatggtgaatttttgttggcatgcaggttaagtgggtcagactactttatagtgacttttctgcttttaccaaagaccaggaacgattaatctcaatcaatggaaggaaacaaaagaacgcattggattttctggaagggatgctgctaatgaaccaaggccccataaataattggagatcctctttcttccctctatctgaccatcccagaatagcttctttaataactgaacatagcatcctctactgtcttgaagtggctaaatattatgacgaacaaaccgagttaaatgtggacaaggtaacctcgtctagtcatatctattatatatagttagatcttgtcacatttctttgtttaaaaaataaaataaaaggcacaatcccaaaaagtcaaaagcaaatgcctagatattgtgtgttttcttggatattaattattacaccttaataacccataataatttttttatttttctttgtctctgtaggaaattgaagttttgctccaaggactagcctatatccctggatttaattatgagaaaaatgtctcgtacgttgagttcttgaatagggtccgaagtggagagttgaaacttcagtcacaaggactgtgggaagttcctcacccgtggcttaatttgtttataccaaaatctcaaatcttggattttaattcaggagtattcaaagatatagttcttaaaagaaacatctcctctggaccagtcttggtttatcccatgaatagaaacaagtaagccttgaatgcatgaatcacaatctagtgtcattataattcaggagtgtgtgatgcaatcttttaattttctgaccattcaactcaatatcaattttatttcttttttcaattaaaatgcaaaagagaataataattaataatatgaaatttaattccaggtgggacgataggatgtcagcatctataccagacgaggatgttttctacacagttgggtttttgcactcaagtgggtttgatacttggaaggcatatgatgctcaaaacagagaaattttggagttctgtagagatgctggcatcatggtcaagcaatatcttcccaaccacagcacacaagaagattggacaaaccattttggtgctaaatggatgaaattcttagaaagaaaacatcagtttgatccaagaatgattctatcacctgggcaaaaaatcttccacaaaaaattacagccagtgttttaaatattttccctaataaaaaaagtaaaaatgttttgtggtgggactacctcaattagatggctagctagggacaggtgtacatacagtgtgaccaagaccaagatggcttttgtatgctaaagtttgcattgctagctagagaaattaataaggtggggcattaaaggctgcatgagtacttttggcacctattatgctacatattaccttagatacgttaggttgacaaagtcgtactggtaggtacaagaagcacagttgtctctcacactgtctgtcacccaacttgctatatagtgtgtggagaaattcggatcatattgaagatgctgtgagttatagtcctccaatattaaatgtttaacgattctgtctttctcttatataattttgttttgcattatattactttcgcactggtgcaaacatatatatcaatgattataattaatttatacaatgacgagtataattgtacccaagttgcatgccataatatttgtcaaaaacaaaaagttgtatgccataatcaatccaggttgctagataataagatagatatgaatatgataacataaaatgctattaaagcaacaaataaacaataacacatagtccttatagggttcataattgatcgatgaacctagctagacgttgattttaggttaatttccagcgaggataaaatttattatataaagaaataactaaccaacacaaaataataaaaaattaaaaaaaaacgaagaaacttattttagagatataatttgttttagtatttgattgtaatttgagagattagctaggctctcaccaagtgagatctagagtatattcttaagaaaatatttataataaagaacccttaaacattttgcaaaacaaagggtggaattaatattaacaacaataattataatatcttgaaaattttatgaaaataatatatatatatatatatatatagagagagagagagagagagagagaaaattctcacaaacaatttttatctgttatttcaaattggtgtatgactccttagtccttagttcatttgtttgcacccagtcctgtcttaggtagttgattttatagttaggtaaattaatttctcgcactcttcgcttgattgtcatttatgggttgaactgttgaagtgattttatattttttaataaatttcacctgcaaaaaaactcaccattagcatacgccccccccccccccccccccccctctcccaaaaaaaaaaaaaaaacgaaagaagattaattagaaagaataaggtcgtgaaatgatgttacaaataaggcatatcagaatcagacgcaagggaagaataaaaacgttacaacaattcgcgcacaatgcaccccaaaaaaaaaatgacaggcacacataccttaaggaagaagaatcaacgctttca

SEQ ID NO: 205 - DNA, 5757 bp, Artificial Sequence
  Synthetic polynucleotide
ataaatggtagaaatctgtgggttcaaatgttcaattgctggggatcttcgtgatcatgatgattcatacacaatctctagaaacacgtacgcaaatattaattaatcaatttcctttttatagtctcctcacaattcacatgaaacttcatactctattatccgattccatttccatcgtatctttgaatttgacatttgtttgcccaacatgtaattaactttcccttctcatcttaaagatgtaacatgatatatattataacttgtaattaacccaatatttttaactctctatttttacactcatctgacatgtatttttatttttcatttttttttcttatcacatcacctcttacgtgtacaatttttctctttttcttatttctgtcttccataatagtaattaatattcatcggtccgatatgtatacagcccaaaaaagtgtgtaaaatcatttttgtatttctaaccctctctttctcatgcaagctagcttcttctttctatttatagcccttctcccttcacccaccaacacaccacaactccaaactttttcctcttgttctcttcttcttcaacacaactagtcataatccagctcatctctctctccctctctctttgttctctctttctctttctccaaaatggctctaaactacccttttttaacctacttcatactactgctagtaaccaatattcactgtgggaaaaactgagcaatggaaagctccgattctaccagagcttgacattgataacatatcccacaaactccatgatgaccctgaaaccattcaaatggcttcaagggactatggccatttaacgcatgaattcccattagctgtgtttcgtccatcttctatagatgacatagtcaccttgataaaatcttcgtacaatagctttgccccttttgacatagctgcgaggggccaaggccactccactcatggacaagccatggctcgtgatgggattgtggtggacatggccagcctaagaaaacaaagaaatggggttgcgattagtgtctctaaggaccctttgatgggtcactatgctgatgttggaggggaacaactctggattgatgtgctacatgccacacttgaatatggacttgcaccagtttcttggactgattatttgtacttgaccgtgggagggacactttctaatgctggaatcagtggccagagcttccgttatggacctcaaatcagcaacgttcatgaaatggatgtcatcactggtatggagttagttgttttttttaatcaataaatgttaatattattagcttgttagttttttttgaaaaaattgaattaactttcgtttcctcttttctttctttttttaaccacacaattaatctaataactactggtattaagttagtttattttccatttttcatatataagttaggatttctaattaaaattgacatttcgtaccaccactacaaaaaaataatgtatcagtggcacaaaaaaatatattggcatcacttgtttttttagtcattaatattttgtagcatcacaaaaaatatggtgacaagttttctaaaaattacaaattaactgattcgtcagtgatgttaatgattttttagtgcgtcttggcaactaatgttttcatcttatataaaattagaaacaatagcggcaacagcacctgacattgtgtttgtgttttgcgtgtttctatcgcctaatttttgttgagaacgtgttcgtgaaacttggaaaaagagaaaattgaaattttcttgagatatctaccacttaagaaaaacaaatggctgtttccgttttgtctcttatgacatgacatggtacgtcatagatgaagttctgctaaatatatttgatatgatttcttgaacacgttttatatattcccacttcccagttagtgtggttgttgaatctaattaaaacaggaatagtctttgtctacaatatgggtgagcgatgcaaactttccaagggtttagaagttagaactatataggtccacggtcataattttatattcttgattaactttatgttggttaagtcgttcatatttggtcaattcattcatatgagaaaatactgaaatacaaacatggaaaaatgttaattactcttataattggcgcatgcatgcatctaaattatatgattttaataaatagtttttgtcatctacttgatttcaggaaaaggagagttcgtaacatgctcttcacagaagaacttggagttattccacgcggttcttggaggcttgggacaatttggagttatagcaagggcgagaattgctcttgagccagcacccaaaagggtacgtttatagagaattgactagaattttgtcttgtagcttttcctccaccaattcatatagtgacacctaatcgaattgtcatttttttttacggtgaattgtcattttgtaaatctaccaagtggtagttggcacccatatatgtatgaactatagtaccatacatttcattttatgttggtgtgttagtcatccatgatgaacacatacacaaatgaaaataggacgagttatacgtacgtaagggtttgaatcactgaatgtggatttttgaagttgaaagcatattaatcttggtttgaaaaagaaaaaaaaaatcggaagtccctcttgaagttatcatgactcttatattaagccaatagaattagaaaaactataattatgaatgatcatgttaattctttcagtgacttaaaatcttatctacaaaaagtacccttttgaaaaagaccttcacttaagtccatgcatacagtactaatcttacatacttgagagttgagacttgaagcatgaggagatttgaagtctggagaaacaagccaccacatattaattactaccgtattcttatctttatttatccttccaattttgatgggactggttgcacatacattcatacatactaacatacataaatacgtctctctctcatgtatttcattttattatattctatttcgttagtaagtttactagtataagacattattaatggtgaatttttgttggcatgcaggttaagtgggtcagactactttatagtgacttttctgcttttaccaaagaccaggaacgattaatctcaatcaatggaaggaaacaaaagaacgcattggattttctggaagggatgctgctaatgaaccaaggccccataaataattggagatcctctttcttccctctatctgaccatcccagaatagcttctttaataactgaacatagcatcctctactgtcttgaagtggctaaatattatgacgaacaaaccgagttaaatgtggacaaggtaacctcgtctagtcatatctattatatatagttagatcttgtcacatttctttgtttaaaaaataaaataaaaggcacaatcccaaaaagtcaaaagcaaatgcctagatattgtgtgttttcttggatattaattattacaccttaataacccataataatttttttatttttctttgtctctgtaggaaattgaagttttgctccaaggactagcctatatccctggatttaattatgagaaaaatgtctcgtacgttgagttcttgaatagggtccgaagtggagagttgaaacttcagtcacaaggactgtgggaagttcctcacccgtggcttaatttgtttataccaaaatctcaaatcttggattttaattcaggagtattcaaagatatagttcttaaaagaaacatctcctctggaccagtcttggtttatcccatgaatagaaacaagtaagccttgaatgcatgaatcacaatctagtgtcattataattcaggagtgtgtgatgcaatcttttaattttctgaccattcaactcaatatcaattttatttcttttttcaattaaaatgcaaaagagaataataattaataatatgaaatttaattccaggtgggacgataggatgtcagcatctataccagacgaggatgttttctacacagttgggtttttgcactcaagtgggtttgatacttggaaggcatatgatgctcaaaacagagaaattttggagttctgtagagatgctggcatcatggtcaagcaatatcttcccaaccacagcacacaagaagattggacaaaccattttggtgctaaatggatgaaattcttagaaagaaaacatcagtttgatccaagaatgattctatcacctgggcaaaaaatcttccacaaaaaattacagccagtgttttaaatattttccctaataaaaaaagtaaaaatgttttgtggtgggactacctcaattagatggctagctagggacaggtgtacatacagtgtgaccaagaccaagatggcttttgtatgctaaagtttgcattgctagctagagaaattaataaggtggggcattaaaggctgcatgagtacttttggcacctattatgctacatattaccttagatacgttaggttgacaaagtcgtactggtaggtacaagaagcacagttgtctctcacactgtctgtcacccaacttgctatatagtgtgtggagaaattcggatcatattgaagatgctgtgagttatagtcctccaatattaaatgtttaacgattctgtctttctcttatataattttgttttgcattatattactttcgcactggtgcaaacatatatatcaatgattataattaatttatacaatgacgagtataattgtacccaagttgcatgccataatatttgtcaaaaacaaaaagttgtatgccataatcaatccaggttgctagataataagatagatatgaatatgataacataaaatgctattaaagcaacaaataaacaataacacatagtccttatagggttcataattgatcgatgaacctagctagacgttgattttaggttaatttccagcgaggataaaatttattatataaagaaataactaaccaacacaaaataataaaaaattaaaaaaaaacgaagaaacttattttagagatataatttgttttagtatttgattgtaatttgagagattagctaggctctcaccaagtgagatctagagtatattcttaagaaaatatttataataaagaacccttaaacattttgcaaaacaaagggtggaattaatattaacaacaataattataatatcttgaaaattttatgaaaataatatatatatatatatatatatagagagagagagagagagagagagaaaattctcacaaacaatttttatctgttatttcaaattggtgtatgactccttagtccttagttcatttgtttgcacccagtcctgtcttaggtagttgattttatagttaggtaaattaatttctcgcactcttcgcttgattgtcatttatgggttgaactgttgaagtgattttatattttttaataaatttcacctgcaaaaaaactcaccattagcatacgccccccccccccccccccccccctctcccaaaaaaaaaaaaaaaacgaaagaagattaattagaaagaataaggtcgtgaaatgatgttacaaataaggcatatcagaatcagacgcaagggaagaataaaaacgttacaacaattcgcgcacaatgcaccccaaaaaaaaaatgacaggcacacataccttaaggaagaagaatcaacgctttca

SEQ ID NO: 206 - DNA, 7388 bp, Artificial Sequence; identical to SEQ ID NO: 133
  Synthetic polynucleotide

SEQ ID NO: 207 - DNA, 8143 bp, Artificial Sequence
  Synthetic polynucleotide
ctacttctagaatgacaactactcctatggcaatatcaattgttagcggtggttcccttaagttcgagactaagggcagtctccaaaaggaagaaaggaaataacaaacttaagcctgaatgttctacgttttatttagtgtctcttgatatttaaaggtctatcaaatatgtataataaccgcacttccactataataaccacactcccactacgataatcgctacaataaccaccacaataactacttctaggatgacaactacctctatataagtttccatgacagaacatcttcttcctaacaccttacctatcacaaatgcttctcctctcggtgtcagagagtactattgattccctaagttctgacggtgtctttttctaaccaaagatccacttttcgaaggtcccgagccaattcgatgagagctcggaggcatagaactcggtttagtcacttatgccatgcttcatttcgtcgcgcgtactttaccaatcaacacacgccatcgagattgatctgcaagtgcagattacgtaagcgagaaaggatttgcaatggaattcacaaatcgcacaatcagagaacaggataagtgtactgctaattatgagcgccagggagtgtagattcatgtcttaggttttaaaattagaacagaataaatatgaaaattgttttttactttctatattttatattttaatttttttttagtttttattattagtaatattgttaattataattaattataaaaattttaacaagtaatttattactaatttatcataagataatttataataaaaaaataattgataatttataattaatttataactaattatttttatattttgtttagtaaagactaaaaggtaattaaaatgtaaattatagagattaaaatatcatttttaaactataagaactaaaaaagaattaaaatacaaactataagacaaaaaagatcacttttaaactataggaactaaaaaaattacttttaaattatatggactaaaaaataccaatcgtaaaattataggaactaaataaataatataaccttaaattttttattttaagatcaattttttaaaaaattaatgttaatcatgatattttatttataaaatatcaaaactcattttgtaaaatggattttcatcaaaataaacgttcactttgctatggtaaatcttgttttgtagtattttggttgttctgacccaaatgacccaaatgcaggctagtggacaatgacattgattgttttgtatatgggttgggtgtcccttgtatcctattgatatattccttttgccttattaagaaaaattgcattagaaactactatatattaaatgctctaacaattaatgattaaattgacaccacatcctgtttgactctccacttttcttttattggtactctctattttagtctgctctttatatacatgttaacttaaagacagcaaatttaccaaagtaacttatcttctctcttgaaagaaaaatgccacagaggaatttagtactattttccacaactatggttgtacatagttcacaaaaccccagtggcaattttcaatccatcttctgttagtgacatcttggccttgatacatttctcaaactctcttcctaacccattccccatagcccctagagggaaagcacactctgttcatggacaagccatgacaaaagatggggtggtgttgaatatgactaacctcaatagcagttttcaaaatgggttaggggttttggtgtctgcttgtgatggaaaaggtccattgatttgttatgctgatgtaggtggtggccaaatgtggatcgatgtcttgcatgcatcccttgaacgtggactcacacctttgtctttgactgattatatgtatgccactgttgggggcacactatctaatgctggcatgggtggcatgtcctttcgatttggacctcagatctctaatgttcttgaattggatgttattacaggtatgactcactcaattttatcaattaattttcttccatactcatctacacgcttgttcgaagtgaaacatttaactgaattttttttatcttggatatcacaattgtgtaatttttcgtctagatttgtgattatgttaattcaatctgtatatcttaataattatattaaagtccctccctccttcaattatctgtcaaatatttaacgaaatatatttatgtgacatttgagaatgttgatgggtttatatgtgttattttagtcgattagattttacgtgtgaagttttagtgtctcccaaattcttattaacattgtgggaaaaaatgagaaaacaatcgcagaactggagtttgattccagattattattattatttagtaattttattattatctatatcataatagtatatttattaactcatttaatatcatatttattacatatatttagtgtaataatagtatatttattacattctttttacatacaaaaagtcagaaagacttaaaagcttctacaaaaagaaatacctgttatatcagctcttaaagaattacatatgaaatcctacgcatttattacacacacacaaatatatatatatatatatacttaaacagaaatatgaattgttattatatttataattagtatttatattaatagaacaatttatagtttatactatggaataaatttttaaatataaatttattatttatattgatatactcatttatagtttttactaagatataagtttataaatataaatttgcacctcttgtgattttgaactggttttttaataaataaaaaataaataaaaagattataaatataaattattattacattaacataataatttacatttattaatttaatactaaatatatatagtaaatgtatcattaaatgaatgtagtaaacatattattaattttcagaaaagttttaatactttttcaccctagaaatatacaaattttttttaattgatataatttttttttgtttatgattcttgtattaatatttaaaccttccgttggagattaacgggtaaaaaatacaaggtttaaacattatataagtaaagttttcttacaacgacaaaacaaaactaattaatatatttacagctaatgatgtttgtttaaaaagtgctaattatatttttttgttctagtcaatgttgtatagttacccaacatataatcagtgacggactttttagttgtggggaaatattcattatatatatatatatatatatgaatcggtgctgcatataatacaatatatacaattttacactgaaaactgtatattattaaaatttatcaggaattatgcttaaatatcttattgtatctatcttattaaagaaatctaattatatctataaaataaaggtttatttcgatcgttttgatatattgtaaatattattttttttgtttgtttttctcgtataaactttaatacatctatatatgtggcttttatatatagggaaaggagaccttgtgacttgctccaaggagcagaactcagaggcattttacgctgctcttggaggattaggtcaatttggggtgataacaagagcaagaatacctctaggacctgcacctactagggcaagtattagtttcccctttcatatagatttcgtaagggtgaaaataaaaataatattttataggactaaaattaaactaatttcatataaacctaaattaaaactcactcaaattatagatgtattaaaatcatatttaatctatatatatgccatttaattttaattgaaacatacatattatatatagatcattttttcctgtaaacttagtcttagacactatacaacttcaatactattaaaattgtaccaaaattaactatcttaaaactaaaaatgagaataagtcgggtaattgacataagtctatgagctcacttgtttaaagcttggtctcatctatctaataaaaaaagttaaacttaaactttttaaaaagtctatttatttatataatttagacttggacttgtgaaaaaacttattaaactgtatagaccggtctaattattcatttaaatatagtaaaacattaaaatatattatacttttattttaatatcttaatatgttaatatatttttatcataaataaaatgaatatttgaaataaatagatctttaaatatgtaataagctaaactatatcatatcttaatttttataacatgccatacctatatatttatataacgtctaacttgacctaacatattatcacccctacttaaaaattatttatctatttatttttaacaaagtttttttcatgtgggtgtttgcaggtaaaatggctccgcctgctatacaacaacttcactgcattttcaagagaccaagaacatttaatatcgttcagtgaaaggaatgacattgctacagcagattatgtagaaggcatgcttctattgaatcagccgccactggatcttctcttttatccagcttctgatcatcaaagggtaacttccttggtaactcaatatggcattatctacatcttggagcttgccaaatactattacaataactctcaggcacatgtcaatgaggtaacttgaaataaaagttgtttttagcatctagttagaaacttcttttatttttattcttatttttttatggacaacatatataatgaatttagtaaagaaatacagagatattctaattgttatatattcatcatacatcaaagatcaaattaatcctcctgattgaaaagaattttgttttcatgaatccaaaagaaacatgtctcaaactcactcaaattgtatggaacccatatattaattaatttatgtacaattcattgttttttactaaattgattatttttcttgtttcttaaataggaagttgcatatttgctgaaagggttaaactttgtacatacatttgtgttcgaaagagatgtgtcatacgaggagtttgtgaacagagtttatcctttggagcaaatgcttaggtcagaaggactttgggaagttcctcacccttggctgaacctctgggttccaagatctagaatctcagattttgatgaaggtgttttcaaggacattgttcttaagcaaaatattactggcggaagttttctagtctacccaacaaacagaagaaacaagtaaattgattagattatttatttttttgtgagtgtcaaattattatctagatcacccgtctcctttaatttacatatcctttctagtgtttccaatatataaaaaaatgacacctcactaaaaaaaataacaaataagagaatttattgttttttaaccacatttttttattgagagaaaacactccacaagaaaaataataataacaacaaaataatttatgtaatttttaaaagaaaaggtcacttaaatttttgcaactctaaaattagttattgaaaaaaaaaacctcaagtctcacatttactagaggaacctcctaagttttttctaaaatgaatatatttctaaaggatatgagacttaaagttttttcaatattaatttacaacattgtgctctgattcaaagtcaagcaatctcctagaataaaagagattgaaaatagcactaacactattggtggggtttgtggtttgtggtctgtggatttaaatttggcatgtggtatttaacagaacttcaacagaggtataaattataaaagatttttttttctgagaaaaagaaataaatggaggtatgttattaaaagagggagtatgaataacaactgtcctaataatactccattgggcctgacagtaggagttgggccataacaattagggacaaaaaataattttggttactaaatttagtcaataattccttttcttagtcacattagatgtttctgttccaatttatttgcttatgtaaatgacttaatttatacatatgtgaggattaaattgaatcaacattatgcttcacaggtgggatgataggatgacaccaattacacctgacgaagatgttttctacgttgtagattttttgcgtgttgctaaaacgtttgatgtggtggacaaactacaggttcaaaacaaacagatactgcggttttgtaatgatgctggtattaagatcacagagtatcttatcgggaacaaaactcatcaacaatgggtggaacactttggcccaaaatggaaactttttgcagatagaaaaactgaatttgatcccaaaaaaatattgtcacctggacatgggattttccagtaaataatgtgctaggtttcagtgaaatctctcattttggaaattcatgaaataaaaatgaaattctgtaccagaaaaaaaaaaaaaaacttgttgtgtaattctgtgccaaacatacattgaattggattgaagttattatgcaattttgtacgaaaaaaaacttatgtatttgattattttatgtttttttattaatgttgaatgttcaaatattctcatgactcacgaacaacggcagatctagaagaaaaaaatggtcgtaagatgtgttgatggtatttaaatgaatgcatgtctacttcaaaatttatttgatagactcatttcgtaaaaaaaaaaaatagaaataacctatttaacaatacttgtttggaaaataaatttaaaaataagaaatttggtcgtttttttatatagaaaatagcattgtttttatgatattttaatgcaattcacgattttatgttgttgggtttttaaataaataaaagttacataaaactttagttttaaattttctttgggactgtgaatggagttaaactctaaaaaagatctataattccaaagtcaggttaccatcaaatattgacatatagcaaaaaaaaaaactactcccttgggaaaattatataaaatattaccttgtcaagagacttgcatttatacaaatgatttatttagcaaaattgttgcatcatgatcaaataggacaaacgttgctaaatcaatgtcactaggcattggcacccttacaagttacaagatacctttaagaaatcgaaaactatttttttcaaaccctttgttttgtgaattaactctttatgagctattttatccctctcaatcggaatataaagagatttttccttacatgacactagtggtctgatcctaagtttgagcttgctcgatgataagcaatgattttaagttttgggtgagaatatataaaaacattggttggagcgttttttgtttttatttttaaagaaaataaaaaataagaatgaaaatatatttatttaaaatttagaaaatattttttctgaatatatttttgaaatagaccaaaaactgaaaataataaatcaacattttcagtcttgtttgaaaaggtgaaaacagcgtggtaccttagagtgctttcttcttaatacattttttttaatcttaaaaatttgaaaatgaaaataaaaaataaacgctcaaatcaagctccacctaaatttttctctattgcaaatgttgaaaaaaatggaaaagcaaaagatctcaaagtaaaataaatatattgtcttttgttacattttgtttcaatgattgtggggaataattgaggtaggataagtggtaggaaaaaatatcaagcaacggataatggtaattgttttatataaaggtttaaatatatttttagtcttttaatttaaaattattattattttttagtccttaaaaacaaatatgcaaattttagtaatctaaaattttaaaatctagttttagtcttgttttgttaactctataacagaggttgtctgtgtggaaaatgatgtgcaattttgtggcgatttctttagtgtgaaaattttgttttaaatttaaatcaaacaaaatgtctcgcaaggcaacaataacgttgttgctgctaacaatcttcgtgtggcaaaatcaacagtggagaaaacgactatcaacaatgttagagaagagttgacgaaggaaaatggggaaaataggacaaacccgaacaaaaaaaccacccttgacttg

SEQ ID NO: 208 - DNA, 8124 bp, Artificial Sequence
  Synthetic polynucleotide
ctacttctagaatgacaactactcctatggcaatatcaattgttagcggtggttcccttaagttcgagactaagggcagtctccaaaaggaagaaaggaaataacaaacttaagcctgaatgttctacgttttatttagtgtctcttgatatttaaaggtctatcaaatatgtataataaccgcacttccactataataaccacactcccactacgataatcgctacaataaccaccacaataactacttctaggatgacaactacctctatataagtttccatgacagaacatcttcttcctaacaccttacctatcacaaatgcttctcctctcggtgtcagagagtactattgattccctaagttctgacggtgtctttttctaaccaaagatccacttttcgaaggtcccgagccaattcgatgagagctcggaggcatagaactcggtttagtcacttatgccatgcttcatttcgtcgcgcgtactttaccaatcaacacacgccatcgagattgatctgcaagtgcagattacgtaagcgagaaaggatttgcaatggaattcacaaatcgcacaatcagagaacaggataagtgtactgctaattatgagcgccagggagtgtagattcatgtcttaggttttaaaattagaacagaataaatatgaaaattgttttttactttctatattttatattttaatttttttttagtttttattattagtaatattgttaattataattaattataaaaattttaacaagtaatttattactaatttatcataagataatttataataaaaaaataattgataatttataattaatttataactaattatttttatattttgtttagtaaagactaaaaggtaattaaaatgtaaattatagagattaaaatatcatttttaaactataagaactaaaaaagaattaaaatacaaactataagacaaaaaagatcacttttaaactataggaactaaaaaaattacttttaaattatatggactaaaaaataccaatcgtaaaattataggaactaaataaataatataaccttaaattttttattttaagatcaattttttaaaaaattaatgttaatcatgatattttatttataaaatatcaaaactcattttgtaaaatggattttcatcaaaataaacgttcactttgctatggtaaatcttgttttgtagtattttggttgttctgacccaaatgacccaaatgcaggctagtggacaatgacattgattgttttgtatatgggttgggtgtcccttgtatcctattgatatattccttttgccttattaagaaaaattgcattagaaactactatatattaaatgctctaacaattaatgattaaattgacaccacatcctgtttgactctccacttttcttttattggtactctctattttagtctgctctttatatacatgttaacttaaagacagcaaatttaccaaagtaacttatcttctctcttgaaagaaaaatgccacagaggaatttagtactacacatagttcacaaaaccccagtggcaattttcaatccatcttctgttagtgacatcttggccttgatacatttctcaaactctcttcctaacccattccccatagcccctagagggaaagcacactctgttcatggacaagccatgacaaaagatggggtggtgttgaatatgactaacctcaatagcagttttcaaaatgggttaggggttttggtgtctgcttgtgatggaaaaggtccattgatttgttatgctgatgtaggtggtggccaaatgtggatcgatgtcttgcatgcatcccttgaacgtggactcacacctttgtctttgactgattatatgtatgccactgttgggggcacactatctaatgctggcatgggtggcatgtcctttcgatttggacctcagatctctaatgttcttgaattggatgttattacaggtatgactcactcaattttatcaattaattttcttccatactcatctacacgcttgttcgaagtgaaacatttaactgaattttttttatcttggatatcacaattgtgtaatttttcgtctagatttgtgattatgttaattcaatctgtatatcttaataattatattaaagtccctccctccttcaattatctgtcaaatatttaacgaaatatatttatgtgacatttgagaatgttgatgggtttatatgtgttattttagtcgattagattttacgtgtgaagttttagtgtctcccaaattcttattaacattgtgggaaaaaatgagaaaacaatcgcagaactggagtttgattccagattattattattatttagtaattttattattatctatatcataatagtatatttattaactcatttaatatcatatttattacatatatttagtgtaataatagtatatttattacattctttttacatacaaaaagtcagaaagacttaaaagcttctacaaaaagaaatacctgttatatcagctcttaaagaattacatatgaaatcctacgcatttattacacacacacaaatatatatatatatatatacttaaacagaaatatgaattgttattatatttataattagtatttatattaatagaacaatttatagtttatactatggaataaatttttaaatataaatttattatttatattgatatactcatttatagtttttactaagatataagtttataaatataaatttgcacctcttgtgattttgaactggttttttaataaataaaaaataaataaaaagattataaatataaattattattacattaacataataatttacatttattaatttaatactaaatatatatagtaaatgtatcattaaatgaatgtagtaaacatattattaattttcagaaaagttttaatactttttcaccctagaaatatacaaattttttttaattgatataatttttttttgtttatgattcttgtattaatatttaaaccttccgttggagattaacgggtaaaaaatacaaggtttaaacattatataagtaaagttttcttacaacgacaaaacaaaactaattaatatatttacagctaatgatgtttgtttaaaaagtgctaattatatttttttgttctagtcaatgttgtatagttacccaacatataatcagtgacggactttttagttgtggggaaatattcattatatatatatatatatatatgaatcggtgctgcatataatacaatatatacaattttacactgaaaactgtatattattaaaatttatcaggaattatgcttaaatatcttattgtatctatcttattaaagaaatctaattatatctataaaataaaggtttatttcgatcgttttgatatattgtaaatattattttttttgtttgtttttctcgtataaactttaatacatctatatatgtggcttttatatatagggaaaggagaccttgtgacttgctccaaggagcagaactcagaggcattttacgctgctcttggaggattaggtcaatttggggtgataacaagagcaagaatacctctaggacctgcacctactagggcaagtattagtttcccctttcatatagatttcgtaagggtgaaaataaaaataatattttataggactaaaattaaactaatttcatataaacctaaattaaaactcactcaaattatagatgtattaaaatcatatttaatctatatatatgccatttaattttaattgaaacatacatattatatatagatcattttttcctgtaaacttagtcttagacactatacaacttcaatactattaaaattgtaccaaaattaactatcttaaaactaaaaatgagaataagtcgggtaattgacataagtctatgagctcacttgtttaaagcttggtctcatctatctaataaaaaaagttaaacttaaactttttaaaaagtctatttatttatataatttagacttggacttgtgaaaaaacttattaaactgtatagaccggtctaattattcatttaaatatagtaaaacattaaaatatattatacttttattttaatatcttaatatgttaatatatttttatcataaataaaatgaatatttgaaataaatagatctttaaatatgtaataagctaaactatatcatatcttaatttttataacatgccatacctatatatttatataacgtctaacttgacctaacatattatcacccctacttaaaaattatttatctatttatttttaacaaagtttttttcatgtgggtgtttgcaggtaaaatggctccgcctgctatacaacaacttcactgcattttcaagagaccaagaacatttaatatcgttcagtgaaaggaatgacattgctacagcagattatgtagaaggcatgcttctattgaatcagccgccactggatcttctcttttatccagcttctgatcatcaaagggtaacttccttggtaactcaatatggcattatctacatcttggagcttgccaaatactattacaataactctcaggcacatgtcaatgaggtaacttgaaataaaagttgtttttagcatctagttagaaacttcttttatttttattcttatttttttatggacaacatatataatgaatttagtaaagaaatacagagatattctaattgttatatattcatcatacatcaaagatcaaattaatcctcctgattgaaaagaattttgttttcatgaatccaaaagaaacatgtctcaaactcactcaaattgtatggaacccatatattaattaatttatgtacaattcattgttttttactaaattgattatttttcttgtttcttaaataggaagttgcatatttgctgaaagggttaaactttgtacatacatttgtgttcgaaagagatgtgtcatacgaggagtttgtgaacagagtttatcctttggagcaaatgcttaggtcagaaggactttgggaagttcctcacccttggctgaacctctgggttccaagatctagaatctcagattttgatgaaggtgttttcaaggacattgttcttaagcaaaatattactggcggaagttttctagtctacccaacaaacagaagaaacaagtaaattgattagattatttatttttttgtgagtgtcaaattattatctagatcacccgtctcctttaatttacatatcctttctagtgtttccaatatataaaaaaatgacacctcactaaaaaaaataacaaataagagaatttattgttttttaaccacatttttttattgagagaaaacactccacaagaaaaataataataacaacaaaataatttatgtaatttttaaaagaaaaggtcacttaaatttttgcaactctaaaattagttattgaaaaaaaaaacctcaagtctcacatttactagaggaacctcctaagttttttctaaaatgaatatatttctaaaggatatgagacttaaagttttttcaatattaatttacaacattgtgctctgattcaaagtcaagcaatctcctagaataaaagagattgaaaatagcactaacactattggtggggtttgtggtttgtggtctgtggatttaaatttggcatgtggtatttaacagaacttcaacagaggtataaattataaaagatttttttttctgagaaaaagaaataaatggaggtatgttattaaaagagggagtatgaataacaactgtcctaataatactccattgggcctgacagtaggagttgggccataacaattagggacaaaaaataattttggttactaaatttagtcaataattccttttcttagtcacattagatgtttctgttccaatttatttgcttatgtaaatgacttaatttatacatatgtgaggattaaattgaatcaacattatgcttcacaggtgggatgataggatgacaccaattacacctgacgaagatgttttctacgttgtagattttttgcgtgttgctaaaacgtttgatgtggtggacaaactacaggttcaaaacaaacagatactgcggttttgtaatgatgctggtattaagatcacagagtatcttatcgggaacaaaactcatcaacaatgggtggaacactttggcccaaaatggaaactttttgcagatagaaaaactgaatttgatcccaaaaaaatattgtcacctggacatgggattttccagtaaataatgtgctaggtttcagtgaaatctctcattttggaaattcatgaaataaaaatgaaattctgtaccagaaaaaaaaaaaaaaacttgttgtgtaattctgtgccaaacatacattgaattggattgaagttattatgcaattttgtacgaaaaaaaacttatgtatttgattattttatgtttttttattaatgttgaatgttcaaatattctcatgactcacgaacaacggcagatctagaagaaaaaaatggtcgtaagatgtgttgatggtatttaaatgaatgcatgtctacttcaaaatttatttgatagactcatttcgtaaaaaaaaaaaatagaaataacctatttaacaatacttgtttggaaaataaatttaaaaataagaaatttggtcgtttttttatatagaaaatagcattgtttttatgatattttaatgcaattcacgattttatgttgttgggtttttaaataaataaaagttacataaaactttagttttaaattttctttgggactgtgaatggagttaaactctaaaaaagatctataattccaaagtcaggttaccatcaaatattgacatatagcaaaaaaaaaaactactcccttgggaaaattatataaaatattaccttgtcaagagacttgcatttatacaaatgatttatttagcaaaattgttgcatcatgatcaaataggacaaacgttgctaaatcaatgtcactaggcattggcacccttacaagttacaagatacctttaagaaatcgaaaactatttttttcaaaccctttgttttgtgaattaactctttatgagctattttatccctctcaatcggaatataaagagatttttccttacatgacactagtggtctgatcctaagtttgagcttgctcgatgataagcaatgattttaagttttgggtgagaatatataaaaacattggttggagcgttttttgtttttatttttaaagaaaataaaaaataagaatgaaaatatatttatttaaaatttagaaaatattttttctgaatatatttttgaaatagaccaaaaactgaaaataataaatcaacattttcagtcttgtttgaaaaggtgaaaacagcgtggtaccttagagtgctttcttcttaatacattttttttaatcttaaaaatttgaaaatgaaaataaaaaataaacgctcaaatcaagctccacctaaatttttctctattgcaaatgttgaaaaaaatggaaaagcaaaagatctcaaagtaaaataaatatattgtcttttgttacattttgtttcaatgattgtggggaataattgaggtaggataagtggtaggaaaaaatatcaagcaacggataatggtaattgttttatataaaggtttaaatatatttttagtcttttaatttaaaattattattattttttagtccttaaaaacaaatatgcaaattttagtaatctaaaattttaaaatctagttttagtcttgttttgttaactctataacagaggttgtctgtgtggaaaatgatgtgcaattttgtggcgatttctttagtgtgaaaattttgttttaaatttaaatcaaacaaaatgtctcgcaaggcaacaataacgttgttgctgctaacaatcttcgtgtggcaaaatcaacagtggagaaaacgactatcaacaatgttagagaagagttgacgaaggaaaatggggaaaataggacaaacccgaacaaaaaaaccacccttgacttg

SEQ ID NO: 209 - DNA, 7396 bp, Artificial Sequence
  Synthetic polynucleotide
ttaaatcggttcaaaattgttgaatcgatccaaaactagtaaatacagtaggttaattgatttcacttgaaatttaaaaaaaaaaaattaaaatgacgtcattttagtttttttttaaattattataacttatatgacatttttaagtgaagtttactttttattattattaatttatgcatactaggtttctgaaatattatattaaaatattatatatatatatatatatatatatatatatatatatatatatatatatatatatatatatatattattaaaatcaattccacttcgattgagctattaacttttgaaccaatatcttccccagttcaatgaccatccaagtctgaaaacattggttaccatcaacgttacccttccgtgaattggaaaagttaatgcaatataggttgatccaaggataagtcctatggtcccagaaagaaaatcttgagagatccttttgataattacccgagtttttactctctccttttaattcacgaaattggaaacttcaattgctaatataaaaagaattttgttagccaatatcatcagggtattgtcaaagaattacaagaaaaaaaaattataagataacataaaaaaataaaaaacaacataattttatatattttaataaaaaattcttttaatttttttttatcaatattctatagttactggcatttgacatgtaaaaatgtaaacatatgaattgataaaatttgaccaatgtttgaccctgagataggaatccaacggccccagttcaattgcaatcttttatttttactacgtgaaggcccaacaatggagaaccttgtggattttattgctgagaatctgtggttacgatgatgacacaccaacacaatcacagaaagcaagtaccgtttggaaggcctaacacttcattaattgcttcattaaatttattttactttctagctgctcaatttaattgctttacacaaatacttcatgacgtttcagaaggagggccaaatacaatctctacaatggttccatcgtatctttgaatttgacatttagcatccctccctttgcacaatgtacaatttgcattttgaatatttttttctcaccttcatatcgtgggactacttctataaccatcctggtgaaaataaataaagcgagggaattacgtaattaaacatatttaaatttctctctcctctgtttaattaatttatcaaaaacaaatatgtgtgcgagtatttaaaaatgtgtaaagtattattattttttaatttttcttttttccttctcatcaatgataaatatactttttaatataaaaatcaaacaataactataaaaaaaacatcttcacttcaattcaacattaaataaaaaataatccctgctttgttattttttacccaccaattatcatatttgttatttattatttttttatgttcttgctataaaggaaatcactatttgactcacacaaaactataaaggaatcaaataatcaattattatttaaaaactctattaaaataacaattacaacaaaatcccttatttttttcttccttatcattattaaaccttcccattctctctttctatctctacatgtttttctcaaattaaatattttctatatcctcctttatcatgcaaattaaagtcctcttccattctatatatagccgctacctcctccacctcctttccccactacaacacacaaacaccaacaaccaaatcaatccatccaccctagaaacaacaaagcactctctcttctctcattctattatcttctctcatcctcttattctctccaaaccaacaaaaaaaaaatggttgctgagaactacccttctcccacatacttcatcctcctgataaccataacacgtttgatctccacagtgggcaaaacctcccaatggacgaaggccctgtcgctgcctccggaactcgcctccgtctccctcgacgacaccatcttctgcaagctccgtgacgacccagaggccctccagggaagggcctccagggactacgggaacctcgtccgcgaggttcccttggcagtcttccacccagcctcagcgagcgacatcgcgaggctgatcaagctgtcgtacaacggctctgtccccttcaagattgcggcgagggggcaagggcactcgacaaggggccaggcgatggcacgtgagggggtggtggtggacatggcggggttcagagagagagggaatggagtggggataagggttgtgagtagtgtggaccctaataataagaatggttactactattatgcggatgttggaggggaacagttgtggatcgatgtgctacacgccacgctcgagcatggacttgcacctatgtcctggactgattacttgtacttgacgctgggagggactctctccaatgctggcatcagtggccagacattccgctatggtcctcaaatcaccactgtccgggaaatggacgtaatcaccggtaagaaaactttccattcaaccagttaacttacatgtttttagttttttagcttccaatatccaatagtttataacttgtaagcttcaattttatgttaatttataagctagttttaccctacttttgaaaattcaaggattttggtactacaataactcccttgtcaaactcgttcaattgttggcttagtatcaagtagactcttggatttttaggtgtactttaacaaccatgttaatttaattgatcagggttttaatattatggaaattggccattggacaacttggaatggaaggaaagcgggagatggaaagggaaaagaaattaattagaataattgttaatattagttgcgtgaaaaaaattaaatttgctgaattaaattatggttcatcacgactctatttgtggcaacaccaacgtgccgttttcagaacttcattgcaacagcggttatagtggcgtttattcaattcatattttaatgcatcagactgtgattgcgattgaaattttatgaaatcttgttttataaacttgttcttttgattaggaaacttgattctattttatatatatttaatgtaacgccgaattaatggttgataaacgagtctttgtctaaaattttggcgaatgttagcaagcgttttccacgtggtcccgtacgtgtttgaaaaattcttaatcatggaatcagttcacacgggcagtcatagactcatagactccaattcttgattaattgttttcttattaatattggtccatggtcttattttggtcaattctttttattaaaaataaacgggctgctgaattttaatttactcaagtgtttgttaatgaatatgtgtgcatgcatgcaattatatatatatatatatattactattatttatttgtgttttaatcaaattttggtttggttcaggaaagggagaatttgtgacttgctctcagcagacgaattcggagttgtttcacgcggttcttggaggcttaggacaatttggaattataacaagggcaagaattgctcttgcgccagctccgaagagggtacgtttaaaatcttcggaattgactaggacttgtcttgttgcttcttcctccaacatctctcatatagtaacgcaaatttctaaatatgttacattattaattcaaccaccaagctttgcggaagcatcaaatgtcgttgtcctgaaagcttcatgtcatcatttttcttggcacccatatacacacacatacgtttcacattgtgtcagtgcatattagtcatccatgaaagacacatgtacaaatgaaaacgagaggagttatattaaaatgtgtgttggaaaaatatatatcatattttcataagtcttaattttgaaattaatatacagtaaccctttgagaccttagcaattaagccaataaaaaggctcgtattaaccccaaccaacaactattagaaaatactaacaagtataggtgtatacataaatgattcatttgaattttagtaccttaattatttaactttatccttctatttgacgggactcgttgcataagccatacatacataatcatgcgttcattattgtttttcattatgagttaatgagttgattgtatgaactaatggtgaatttttgttggcaggttaaatgggtgagacttttgtacaatgacttttctgcttttaccaaagaccaggaacaactaatatctatcactggaaggaaacaaaatgtttcactggattatttggaaggattgctgctaatgcaccaaggacccataaataattggagatcttctttcttccctttagccgaccatgcccgaataatttcgctagtaactaaacacagcgtcctctattgcctagaagttgccaaatattatgatggccaaaatgaaaacaatgtggacaaggtaccatctccattcatgtgcatttgccttgatgatgtttcttctattttttcttttaatgttttgatctcaccttatataataaccctttatcacactcaatcttgttatatttttaagagtttaatgataatattatgattttgttgtgaaaaaagagagtttaattgttattatataatcacaaattatcattaatatgacttttaaaataattaataatataaaaattaataaatttatcgtatttaatgagttataattaaatgatcatataaaattattttatattattaacatatagtttttttttctatttttaatatttgttttactataagttgttatattttcaatcttttttctagtataagttttaataatcaatattgtaagtaatattctcatttttcatgttgtgtaggaactccaagttttactacaaggattgagctatatccctggattttactatgaaaaagatgtctcatattttgagttcttgaatagagtccgaagtggagagttgaagctacagtcacaaggactatgggatgttcctcacccgtggcttaatttgtttataccgaaatctcaaatcatggaatttgactcgggcgtgttcaagaatatcatccttaaacgaaacatcaccacaggacctgtcttggtttaccccatgaatagaaacaagtaattgagcttaactaactaatctcaacttatgttgttatcattaggaaaaatgttaattggtacgaaaactatatataccactattttcatttaaattcatgaaagtgaaatttctctttcctaaaacaaattctttctcttaaaatgaatttttgtttttctcaatctccatcaattacttatttccttttttgaatgtttgaaaagtcattcacaacattttcttcataaaagggttattcgtaccaatttaaatagaattgccgttattatcagatgtacaattcttctcttcactcacttcttttccattaaaattgtaaaaaaaaaataaaaaaatcaggtgggacaataggatgtcagcatcaatacccgatgaggatatcttctacacagttggatttttgcattcaagtgggtttgataattggaaggcctatgatgctcaaaataaagaaattctacaattttgtaacgttgctgggatcaaggttaagcaatatcttccccactatcgcacacaagaagattgggcaaaccattttggccctaaatggaggacttttgtagaaagaaaacaccagtttgatccaagaatgattctatcacctggacaaagaatctttaacaattaaaatagctttaaaaatatatattcccccccccccccccccccccaaaaaaaaaaaaattatataatatggtgggactacccaagttagctagctggctgatcacaagtgtgcacataggacccagaattcagatgatagcctttgtacttgtttttgttaagagggtggggttaaaagctgcatgactttggcatatatgtagatcaggttacacatactttagatacgttaggttgacaaaatcatgtgtgaaataagatgcacacagctagctgtgtacctttctttctctctgtccctcaatttgtctatcactaaaaagatttctatatagtttagaacctagtgaagagaaagaaaaaaccattatattgaggatttaattttatcacgttctaatcctatacattaatattcttaaatgtgcaatgagtgtgctcggtgccttaatgattctttatctttgttaattgttatattgtagggttttgtttttgccttcctaattttgtaacaggggcacccctagcaataattgagatcctaggttaactaaggaacagcattattgtgtctaaattgagattcctagctgtatgccataataataaatcatcgtaggttgctagatagatgtgatagcgccaaatgccttccaatactataatctccattgcaagatccttcgttgtgattgtgtagaaaagattacgctgctttacaagagaatactccaagaaagcaagtgattgctccttaatataaagaatcatgcaataaacaaatggtgtcgtaatccataaagtgtatttaatatttgatgaaagagtagtgtagacatcaaacaaaataaagtttgatgcaattcgaattatagatacttgattaatctctaaattatgttgagacaatcatatttgaatttgataagactattatgaacgataaaaaatattataaataataaaaaaatttcatcaaacatttaatacaattatataccttactcaaatttgaaaacctgtacatataggaaaaaaacctttactaaaagaggttaaactcaccatacggatttttatatgtcgaagggatctttaattgtccatcggaaaacatcctaattcataaaaaaggaaagaaagtttagacatgaataattacggaccaatgaatgcaacctacgtctctcaattttaaggagaatttaggaatattatagtatatcactgaaagtacacacaagtggcaatgatgaatattttaatttaaagttttaattggattcgaaattaatcccttcttttttccagaaaaaataataatcatcgagtaatcaagacaatttcccaagtagacaacaagaatacaaaagagaatacgtgacttcgtttcaccatagaaaagaaggaatgcaataacgatgataataattataaaatgaaattgacaaaatatctaaatgcctgtagatatttctacagcgaatgataagtgtttttccattaaaaataagtttcttttgttaagaatttctaacatttttagttccaaaatataggaatgaagccaataagtaagtaagaatttctaacgtctgaaag

SEQ ID NO: 210 - DNA, 7388 bp, Artificial Sequence
  Synthetic polynucleotide
ttaaatcggttcaaaattgttgaatcgatccaaaactagtaaatacagtaggttaattgatttcacttgaaatttaaaaaaaaaaaattaaaatgacgtcattttagtttttttttaaattattataacttatatgacatttttaagtgaagtttactttttattattattaatttatgcatactaggtttctgaaatattatattaaaatattatatatatatatatatatatatatatatatatatatatatatatatatatatatatatatatattattaaaatcaattccacttcgattgagctattaacttttgaaccaatatcttccccagttcaatgaccatccaagtctgaaaacattggttaccatcaacgttacccttccgtgaattggaaaagttaatgcaatataggttgatccaaggataagtcctatggtcccagaaagaaaatcttgagagatccttttgataattacccgagtttttactctctccttttaattcacgaaattggaaacttcaattgctaatataaaaagaattttgttagccaatatcatcagggtattgtcaaagaattacaagaaaaaaaaattataagataacataaaaaaataaaaaacaacataattttatatattttaataaaaaattcttttaatttttttttatcaatattctatagttactggcatttgacatgtaaaaatgtaaacatatgaattgataaaatttgaccaatgtttgaccctgagataggaatccaacggccccagttcaattgcaatcttttatttttactacgtgaaggcccaacaatggagaaccttgtggattttattgctgagaatctgtggttacgatgatgacacaccaacacaatcacagaaagcaagtaccgtttggaaggcctaacacttcattaattgcttcattaaatttattttactttctagctgctcaatttaattgctttacacaaatacttcatgacgtttcagaaggagggccaaatacaatctctacaatggttccatcgtatctttgaatttgacatttagcatccctccctttgcacaatgtacaatttgcattttgaatatttttttctcaccttcatatcgtgggactacttctataaccatcctggtgaaaataaataaagcgagggaattacgtaattaaacatatttaaatttctctctcctctgtttaattaatttatcaaaaacaaatatgtgtgcgagtatttaaaaatgtgtaaagtattattattttttaatttttcttttttccttctcatcaatgataaatatactttttaatataaaaatcaaacaataactataaaaaaaacatcttcacttcaattcaacattaaataaaaaataatccctgctttgttattttttacccaccaattatcatatttgttatttattatttttttatgttcttgctataaaggaaatcactatttgactcacacaaaactataaaggaatcaaataatcaattattatttaaaaactctattaaaataacaattacaacaaaatcccttatttttttcttccttatcattattaaaccttcccattctctctttctatctctacatgtttttctcaaattaaatattttctatatcctcctttatcatgcaaattaaagtcctcttccattctatatatagccgctacctcctccacctcctttccccactacaacacacaaacaccaacaaccaaatcaatccatccaccctagaaacaacaaagcactctctcttctctcattctattatcttctctcatcctcttattctctccaaaccaacaaaaaaaaaatggttgctgagaactacccttctcccacatacttcatcctccataacacgtttgatctccacagtgggcaaaacctcccaatggacgaaggccctgtcgctgcctccggaactcgcctccgtctccctcgacgacaccatcttctgcaagctccgtgacgacccagaggccctccagggaagggcctccagggactacgggaacctcgtccgcgaggttcccttggcagtcttccacccagcctcagcgagcgacatcgcgaggctgatcaagctgtcgtacaacggctctgtccccttcaagattgcggcgagggggcaagggcactcgacaaggggccaggcgatggcacgtgagggggtggtggtggacatggcggggttcagagagagagggaatggagtggggataagggttgtgagtagtgtggaccctaataataagaatggttactactattatgcggatgttggaggggaacagttgtggatcgatgtgctacacgccacgctcgagcatggacttgcacctatgtcctggactgattacttgtacttgacgctgggagggactctctccaatgctggcatcagtggccagacattccgctatggtcctcaaatcaccactgtccgggaaatggacgtaatcaccggtaagaaaactttccattcaaccagttaacttacatgtttttagttttttagcttccaatatccaatagtttataacttgtaagcttcaattttatgttaatttataagctagttttaccctacttttgaaaattcaaggattttggtactacaataactcccttgtcaaactcgttcaattgttggcttagtatcaagtagactcttggatttttaggtgtactttaacaaccatgttaatttaattgatcagggttttaatattatggaaattggccattggacaacttggaatggaaggaaagcgggagatggaaagggaaaagaaattaattagaataattgttaatattagttgcgtgaaaaaaattaaatttgctgaattaaattatggttcatcacgactctatttgtggcaacaccaacgtgccgttttcagaacttcattgcaacagcggttatagtggcgtttattcaattcatattttaatgcatcagactgtgattgcgattgaaattttatgaaatcttgttttataaacttgttcttttgattaggaaacttgattctattttatatatatttaatgtaacgccgaattaatggttgataaacgagtctttgtctaaaattttggcgaatgttagcaagcgttttccacgtggtcccgtacgtgtttgaaaaattcttaatcatggaatcagttcacacgggcagtcatagactcatagactccaattcttgattaattgttttcttattaatattggtccatggtcttattttggtcaattctttttattaaaaataaacgggctgctgaattttaatttactcaagtgtttgttaatgaatatgtgtgcatgcatgcaattatatatatatatatatattactattatttatttgtgttttaatcaaattttggtttggttcaggaaagggagaatttgtgacttgctctcagcagacgaattcggagttgtttcacgcggttcttggaggcttaggacaatttggaattataacaagggcaagaattgctcttgcgccagctccgaagagggtacgtttaaaatcttcggaattgactaggacttgtcttgttgcttcttcctccaacatctctcatatagtaacgcaaatttctaaatatgttacattattaattcaaccaccaagctttgcggaagcatcaaatgtcgttgtcctgaaagcttcatgtcatcatttttcttggcacccatatacacacacatacgtttcacattgtgtcagtgcatattagtcatccatgaaagacacatgtacaaatgaaaacgagaggagttatattaaaatgtgtgttggaaaaatatatatcatattttcataagtcttaattttgaaattaatatacagtaaccctttgagaccttagcaattaagccaataaaaaggctcgtattaaccccaaccaacaactattagaaaatactaacaagtataggtgtatacataaatgattcatttgaattttagtaccttaattatttaactttatccttctatttgacgggactcgttgcataagccatacatacataatcatgcgttcattattgtttttcattatgagttaatgagttgattgtatgaactaatggtgaatttttgttggcaggttaaatgggtgagacttttgtacaatgacttttctgcttttaccaaagaccaggaacaactaatatctatcactggaaggaaacaaaatgtttcactggattatttggaaggattgctgctaatgcaccaaggacccataaataattggagatcttctttcttccctttagccgaccatgcccgaataatttcgctagtaactaaacacagcgtcctctattgcctagaagttgccaaatattatgatggccaaaatgaaaacaatgtggacaaggtaccatctccattcatgtgcatttgccttgatgatgtttcttctattttttcttttaatgttttgatctcaccttatataataaccctttatcacactcaatcttgttatatttttaagagtttaatgataatattatgattttgttgtgaaaaaagagagtttaattgttattatataatcacaaattatcattaatatgacttttaaaataattaataatataaaaattaataaatttatcgtatttaatgagttataattaaatgatcatataaaattattttatattattaacatatagtttttttttctatttttaatatttgttttactataagttgttatattttcaatcttttttctagtataagttttaataatcaatattgtaagtaatattctcatttttcatgttgtgtaggaactccaagttttactacaaggattgagctatatccctggattttactatgaaaaagatgtctcatattttgagttcttgaatagagtccgaagtggagagttgaagctacagtcacaaggactatgggatgttcctcacccgtggcttaatttgtttataccgaaatctcaaatcatggaatttgactcgggcgtgttcaagaatatcatccttaaacgaaacatcaccacaggacctgtcttggtttaccccatgaatagaaacaagtaattgagcttaactaactaatctcaacttatgttgttatcattaggaaaaatgttaattggtacgaaaactatatataccactattttcatttaaattcatgaaagtgaaatttctctttcctaaaacaaattctttctcttaaaatgaatttttgtttttctcaatctccatcaattacttatttccttttttgaatgtttgaaaagtcattcacaacattttcttcataaaagggttattcgtaccaatttaaatagaattgccgttattatcagatgtacaattcttctcttcactcacttcttttccattaaaattgtaaaaaaaaaataaaaaaatcaggtgggacaataggatgtcagcatcaatacccgatgaggatatcttctacacagttggatttttgcattcaagtgggtttgataattggaaggcctatgatgctcaaaataaagaaattctacaattttgtaacgttgctgggatcaaggttaagcaatatcttccccactatcgcacacaagaagattgggcaaaccattttggccctaaatggaggacttttgtagaaagaaaacaccagtttgatccaagaatgattctatcacctggacaaagaatctttaacaattaaaatagctttaaaaatatatattcccccccccccccccccccccaaaaaaaaaaaaattatataatatggtgggactacccaagttagctagctggctgatcacaagtgtgcacataggacccagaattcagatgatagcctttgtacttgtttttgttaagagggtggggttaaaagctgcatgactttggcatatatgtagatcaggttacacatactttagatacgttaggttgacaaaatcatgtgtgaaataagatgcacacagctagctgtgtacctttctttctctctgtccctcaatttgtctatcactaaaaagatttctatatagtttagaacctagtgaagagaaagaaaaaaccattatattgaggatttaattttatcacgttctaatcctatacattaatattcttaaatgtgcaatgagtgtgctcggtgccttaatgattctttatctttgttaattgttatattgtagggttttgtttttgccttcctaattttgtaacaggggcacccctagcaataattgagatcctaggttaactaaggaacagcattattgtgtctaaattgagattcctagctgtatgccataataataaatcatcgtaggttgctagatagatgtgatagcgccaaatgccttccaatactataatctccattgcaagatccttcgttgtgattgtgtagaaaagattacgctgctttacaagagaatactccaagaaagcaagtgattgctccttaatataaagaatcatgcaataaacaaatggtgtcgtaatccataaagtgtatttaatatttgatgaaagagtagtgtagacatcaaacaaaataaagtttgatgcaattcgaattatagatacttgattaatctctaaattatgttgagacaatcatatttgaatttgataagactattatgaacgataaaaaatattataaataataaaaaaatttcatcaaacatttaatacaattatataccttactcaaatttgaaaacctgtacatataggaaaaaaacctttactaaaagaggttaaactcaccatacggatttttatatgtcgaagggatctttaattgtccatcggaaaacatcctaattcataaaaaaggaaagaaagtttagacatgaataattacggaccaatgaatgcaacctacgtctctcaattttaaggagaatttaggaatattatagtatatcactgaaagtacacacaagtggcaatgatgaatattttaatttaaagttttaattggattcgaaattaatcccttcttttttccagaaaaaataataatcatcgagtaatcaagacaatttcccaagtagacaacaagaatacaaaagagaatacgtgacttcgtttcaccatagaaaagaaggaatgcaataacgatgataataattataaaatgaaattgacaaaatatctaaatgcctgtagatatttctacagcgaatgataagtgtttttccattaaaaataagtttcttttgttaagaatttctaacatttttagttccaaaatataggaatgaagccaataagtaagtaagaatttctaacgtctgaaag

SEQ ID NO: 211 - DNA, 8261 bp, Artificial Sequence
  Synthetic polynucleotide
ctacttctagaatgacaactactcctatggcaatatcaattgttagcggtggttcccttaagttcgagactaagggcagtctccaaaaggaagaaaggaaataacaaacttaagcctgaatgttctacgttttatttagtgtctcttgatatttaaaggtctatcaaatatgtataataaccgcacttccactataataaccacactcccactacgataatcgctacaataaccaccacaataactacttctaggatgacaactacctctatataagtttccatgacagaacatcttcttcctaacaccttacctatcacaaatgcttctcctctcggtgtcagagagtactattgattccctaagttctgacggtgtctttttctaaccaaagatccacttttcgaaggtcccgagccaattcgatgagagctcggaggcatagaactcggtttagtcacttatgccatgcttcatttcgtcgcgcgtactttaccaatcaacacacgccatcgagattgatctgcaagtgcagattacgtaagcgagaaaggatttgcaatggaattcacaaatcgcacaatcagagaacaggataagtgtactgctaattatgagcgccagggagtgtagattcatgtcttaggttttaaaattagaacagaataaatatgaaaattgttttttactttctatattttatattttaatttttttttagtttttattattagtaatattgttaattataattaattataaaaattttaacaagtaatttattactaatttatcataagataatttataataaaaaaataattgataatttataattaatttataactaattatttttatattttgtttagtaaagactaaaaggtaattaaaatgtaaattatagagattaaaatatcatttttaaactataagaactaaaaaagaattaaaatacaaactataagacaaaaaagatcacttttaaactataggaactaaaaaaattacttttaaattatatggactaaaaaataccaatcgtaaaattataggaactaaataaataatataaccttaaattttttattttaagatcaattttttaaaaaattaatgttaatcatgatattttatttataaaatatcaaaactcattttgtaaaatggattttcatcaaaataaacgttcactttgctatggtaaatcttgttttgtagtattttggttgttctgacccaaatgacccaaatgcaggctagtggacaatgacattgattgttttgtatatgggttgggtgtcccttgtatcctattgatatattccttttgccttattaagaaaaattgcattagaaactactatatattaaatgctctaacaattaatgattaaattgacaccacatcctgtttgactctccacttttcttttattggtactctctattttagtctgctctttatatacatgttaacttaaagacagcaaatttaccaaagtaacttatcttctctcttgaaagaaaaatgccacagaggaatttagtactattttccacaactatggttgtgctattgctatctagcatagtgctcacacaagcacaaccacgatcatggtcagcattccaagcatccaaagaactagccacaaagcttagtcgtaaccctcaaacctttccacatgccacatagttcacaaaaccccagtggcaattttcaatccatcttctgttagtgacatcttggccttgatacatttctcaaactctcttcctaacccattccccatagcccctagagggaaagcacactctgttcatggacaagccatgacaaaagatggggtggtgttgaatatgactaacctcaatagcagttttcaaaatgggttaggggttttggtgtctgcttgtgatggaaaaggtccattgatttgttatgctgatgtaggtggtggccaaatgtggatcgatgtcttgcatgcatcccttgaacgtggactcacacctttgtctttgactgattatatgtatgccactgttgggggcacactatctaatgctggcatgggtggcatgtcctttcgatttggacctcagatctctaatgttcttgaattggatgttattacaggtatgactcactcaattttatcaattaattttcttccatactcatctacacgcttgttcgaagtgaaacatttaactgaattttttttatcttggatatcacaattgtgtaatttttcgtctagatttgtgattatgttaattcaatctgtatatcttaataattatattaaagtccctccctccttcaattatctgtcaaatatttaacgaaatatatttatgtgacatttgagaatgttgatgggtttatatgtgttattttagtcgattagattttacgtgtgaagttttagtgtctcccaaattcttattaacattgtgggaaaaaatgagaaaacaatcgcagaactggagtttgattccagattattattattatttagtaattttattattatctatatcataatagtatatttattaactcatttaatatcatatttattacatatatttagtgtaataatagtatatttattacattctttttacatacaaaaagtcagaaagacttaaaagcttctacaaaaagaaatacctgttatatcagctcttaaagaattacatatgaaatcctacgcatttattacacacacacaaatatatatatatatatatacttaaacagaaatatgaattgttattatatttataattagtatttatattaatagaacaatttatagtttatactatggaataaatttttaaatataaatttattatttatattgatatactcatttatagtttttactaagatataagtttataaatataaatttgcacctcttgtgattttgaactggttttttaataaataaaaaataaataaaaagattataaatataaattattattacattaacataataatttacatttattaatttaatactaaatatatatagtaaatgtatcattaaatgaatgtagtaaacatattattaattttcagaaaagttttaatactttttcaccctagaaatatacaaattttttttaattgatataatttttttttgtttatgattcttgtattaatatttaaaccttccgttggagattaacgggtaaaaaatacaaggtttaaacattatataagtaaagttttcttacaacgacaaaacaaaactaattaatatatttacagctaatgatgtttgtttaaaaagtgctaattatatttttttgttctagtcaatgttgtatagttacccaacatataatcagtgacggactttttagttgtggggaaatattcattatatatatatatatatatatgaatcggtgctgcatataatacaatatatacaattttacactgaaaactgtatattattaaaatttatcaggaattatgcttaaatatcttattgtatctatcttattaaagaaatctaattatatctataaaataaaggtttatttcgatcgttttgatatattgtaaatattattttttttgtttgtttttctcgtataaactttaatacatctatatatgtggcttttatatatagggaaaggagaccttgtgacttgctccaaggagcagaactcagaggcattttacgctgctcttggaggattaggtcaatttggggtgataacaagagcaagaatacctctaggacctgcacctactagggcaagtattagtttcccctttcatatagatttcgtaagggtgaaaataaaaataatattttataggactaaaattaaactaatttcatataaacctaaattaaaactcactcaaattatagatgtattaaaatcatatttaatctatatatatgccatttaattttaattgaaacatacatattatatatagatcattttttcctgtaaacttagtcttagacactatacaacttcaatactattaaaattgtaccaaaattaactatcttaaaactaaaaatgagaataagtcgggtaattgacataagtctatgagctcacttgtttaaagcttggtctcatctatctaataaaaaaagttaaacttaaactttttaaaaagtctatttatttatataatttagacttggacttgtgaaaaaacttattaaactgtatagaccggtctaattattcatttaaatatagtaaaacattaaaatatattatacttttattttaatatcttaatatgttaatatatttttatcataaataaaatgaatatttgaaataaatagatctttaaatatgtaataagctaaactatatcatatcttaatttttataacatgccatacctatatatttatataacgtctaacttgacctaacatattatcacccctacttaaaaattatttatctatttatttttaacaaagtttttttcatgtgggtgtttgcaggtaaaatggctccgcctgctatacaacaacttcactgcattttcaagagaccaagaacatttaatatcgttcagtgaaaggaatgacattgctacagcagattatgtagaaggcatgcttctattgaatcagccgccactggatcttctcttttatccagcttctgatcatcaaagggtaacttccttggtaactcaatatggcattatctacatcttggagcttgccaaatactattacaataactctcaggcacatgtcaatgaggtaacttgaaataaaagttgtttttagcatctagttagaaacttcttttatttttattcttatttttttatggacaacatatataatgaatttagtaaagaaatacagagatattctaattgttatatattcatcatacatcaaagatcaaattaatcctcctgattgaaaagaattttgttttcatgaatccaaaagaaacatgtctcaaactcactcaaattgtatggaacccatatattaattaatttatgtacaattcattgttttttactaaattgattatttttcttgtttcttaaataggaagttgcatatttgctgaaagggttaaactttgtacatacatttgtgttcgaaagagatgtgtcatacgaggagtttgtgaacagagtttatcctttggagcaaatgcttaggtcagaaggactttgggaagttcctcacccttggctgaacctctgggttccaagatctagaatctcagattttgatgaaggtgttttcaaggacattgttcttaagcaaaatattactggcggaagttttctagtctacccaacaaacagaagaaacaagtaaattgattagattatttatttttttgtgagtgtcaaattattatctagatcacccgtctcctttaatttacatatcctttctagtgtttccaatatataaaaaaatgacacctcactaaaaaaaataacaaataagagaatttattgttttttaaccacatttttttattgagagaaaacactccacaagaaaaataataataacaacaaaataatttatgtaatttttaaaagaaaaggtcacttaaatttttgcaactctaaaattagttattgaaaaaaaaaacctcaagtctcacatttactagaggaacctcctaagttttttctaaaatgaatatatttctaaaggatatgagacttaaagttttttcaatattaatttacaacattgtgctctgattcaaagtcaagcaatctcctagaataaaagagattgaaaatagcactaacactattggtggggtttgtggtttgtggtctgtggatttaaatttggcatgtggtatttaacagaacttcaacagaggtataaattataaaagatttttttttctgagaaaaagaaataaatggaggtatgttattaaaagagggagtatgaataacaactgtcctaataatactccattgggcctgacagtaggagttgggccataacaattagggacaaaaaataattttggttactaaatttagtcaataattccttttcttagtcacattagatgtttctgttccaatttatttgcttatgtaaatgacttaatttatacatatgtgaggattaaattgaatcaacattatgcttcacaggtgggatgataggatgacaccaattacacctgacgaagatgttttctacgttgtagattttttgcgtgttgctaaaacgtttgatgtggtggacaaactacaggttcaaaacaaacagatactgcggttttgtaatgatgctggtattaagatcacagagtatcttatcgggaacaaaactcatcaacaatgggtggaacactttggcccaaaatggaaactttttgcagatagaaaaactgaatttgatcccaaaaaaatattgtcacctggacatgggattttccagtaaataatgtgctaggtttcagtgaaatctctcattttggaaattcatgaaataaaaatgaaattctgtaccagaaaaaaaaaaaaaaacttgttgtgtaattctgtgccaaacatacattgaattggattgaagttattatgcaattttgtacgaaaaaaaacttatgtatttgattattttatgtttttttattaatgttgaatgttcaaatattctcatgactcacgaacaacggcagatctagaagaaaaaaatggtcgtaagatgtgttgatggtatttaaatgaatgcatgtctacttcaaaatttatttgatagactcatttcgtaaaaaaaaaaaatagaaataacctatttaacaatacttgtttggaaaataaatttaaaaataagaaatttggtcgtttttttatatagaaaatagcattgtttttatgatattttaatgcaattcacgattttatgttgttgggtttttaaataaataaaagttacataaaactttagttttaaattttctttgggactgtgaatggagttaaactctaaaaaagatctataattccaaagtcaggttaccatcaaatattgacatatagcaaaaaaaaaaactactcccttgggaaaattatataaaatattaccttgtcaagagacttgcatttatacaaatgatttatttagcaaaattgttgcatcatgatcaaataggacaaacgttgctaaatcaatgtcactaggcattggcacccttacaagttacaagatacctttaagaaatcgaaaactatttttttcaaaccctttgttttgtgaattaactctttatgagctattttatccctctcaatcggaatataaagagatttttccttacatgacactagtggtctgatcctaagtttgagcttgctcgatgataagcaatgattttaagttttgggtgagaatatataaaaacattggttggagcgttttttgtttttatttttaaagaaaataaaaaataagaatgaaaatatatttatttaaaatttagaaaatattttttctgaatatatttttgaaatagaccaaaaactgaaaataataaatcaacattttcagtcttgtttgaaaaggtgaaaacagcgtggtaccttagagtgctttcttcttaatacattttttttaatcttaaaaatttgaaaatgaaaataaaaaataaacgctcaaatcaagctccacctaaatttttctctattgcaaatgttgaaaaaaatggaaaagcaaaagatctcaaagtaaaataaatatattgtcttttgttacattttgtttcaatgattgtggggaataattgaggtaggataagtggtaggaaaaaatatcaagcaacggataatggtaattgttttatataaaggtttaaatatatttttagtcttttaatttaaaattattattattttttagtccttaaaaacaaatatgcaaattttagtaatctaaaattttaaaatctagttttagtcttgttttgttaactctataacagaggttgtctgtgtggaaaatgatgtgcaattttgtggcgatttctttagtgtgaaaattttgttttaaatttaaatcaaacaaaatgtctcgcaaggcaacaataacgttgttgctgctaacaatcttcgtgtggcaaaatcaacagtggagaaaacgactatcaacaatgttagagaagagttgacgaaggaaaatggggaaaataggacaaacccgaacaaaaaaaccacccttgacttg

SEQ ID NO: 212 - DNA, 8266 bp, Artificial Sequence
  Synthetic polynucleotide
ctacttctagaatgacaactactcctatggcaatatcaattgttagcggtggttcccttaagttcgagactaagggcagtctccaaaaggaagaaaggaaataacaaacttaagcctgaatgttctacgttttatttagtgtctcttgatatttaaaggtctatcaaatatgtataataaccgcacttccactataataaccacactcccactacgataatcgctacaataaccaccacaataactacttctaggatgacaactacctctatataagtttccatgacagaacatcttcttcctaacaccttacctatcacaaatgcttctcctctcggtgtcagagagtactattgattccctaagttctgacggtgtctttttctaaccaaagatccacttttcgaaggtcccgagccaattcgatgagagctcggaggcatagaactcggtttagtcacttatgccatgcttcatttcgtcgcgcgtactttaccaatcaacacacgccatcgagattgatctgcaagtgcagattacgtaagcgagaaaggatttgcaatggaattcacaaatcgcacaatcagagaacaggataagtgtactgctaattatgagcgccagggagtgtagattcatgtcttaggttttaaaattagaacagaataaatatgaaaattgttttttactttctatattttatattttaatttttttttagtttttattattagtaatattgttaattataattaattataaaaattttaacaagtaatttattactaatttatcataagataatttataataaaaaaataattgataatttataattaatttataactaattatttttatattttgtttagtaaagactaaaaggtaattaaaatgtaaattatagagattaaaatatcatttttaaactataagaactaaaaaagaattaaaatacaaactataagacaaaaaagatcacttttaaactataggaactaaaaaaattacttttaaattatatggactaaaaaataccaatcgtaaaattataggaactaaataaataatataaccttaaattttttattttaagatcaattttttaaaaaattaatgttaatcatgatattttatttataaaatatcaaaactcattttgtaaaatggattttcatcaaaataaacgttcactttgctatggtaaatcttgttttgtagtattttggttgttctgacccaaatgacccaaatgcaggctagtggacaatgacattgattgttttgtatatgggttgggtgtcccttgtatcctattgatatattccttttgccttattaagaaaaattgcattagaaactactatatattaaatgctctaacaattaatgattaaattgacaccacatcctgtttgactctccacttttcttttattggtactctctattttagtctgctctttatatacatgttaacttaaagacagcaaatttaccaaagtaacttatcttctctcttgaaagaaaaatgccacagaggaatttagtactattttccacaactatggttatctagcatagtgctcacacaagcacaaccacgatcatggtcagcattccaagcatccaaagaactagccacaaagcttagtcgtaaccctcaaacctttccacatgcctcaaccgattatgggcacatagttcacaaaaccccagtggcaattttcaatccatcttctgttagtgacatcttggccttgatacatttctcaaactctcttcctaacccattccccatagcccctagagggaaagcacactctgttcatggacaagccatgacaaaagatggggtggtgttgaatatgactaacctcaatagcagttttcaaaatgggttaggggttttggtgtctgcttgtgatggaaaaggtccattgatttgttatgctgatgtaggtggtggccaaatgtggatcgatgtcttgcatgcatcccttgaacgtggactcacacctttgtctttgactgattatatgtatgccactgttgggggcacactatctaatgctggcatgggtggcatgtcctttcgatttggacctcagatctctaatgttcttgaattggatgttattacaggtatgactcactcaattttatcaattaattttcttccatactcatctacacgcttgttcgaagtgaaacatttaactgaattttttttatcttggatatcacaattgtgtaatttttcgtctagatttgtgattatgttaattcaatctgtatatcttaataattatattaaagtccctccctccttcaattatctgtcaaatatttaacgaaatatatttatgtgacatttgagaatgttgatgggtttatatgtgttattttagtcgattagattttacgtgtgaagttttagtgtctcccaaattcttattaacattgtgggaaaaaatgagaaaacaatcgcagaactggagtttgattccagattattattattatttagtaattttattattatctatatcataatagtatatttattaactcatttaatatcatatttattacatatatttagtgtaataatagtatatttattacattctttttacatacaaaaagtcagaaagacttaaaagcttctacaaaaagaaatacctgttatatcagctcttaaagaattacatatgaaatcctacgcatttattacacacacacaaatatatatatatatatatacttaaacagaaatatgaattgttattatatttataattagtatttatattaatagaacaatttatagtttatactatggaataaatttttaaatataaatttattatttatattgatatactcatttatagtttttactaagatataagtttataaatataaatttgcacctcttgtgattttgaactggttttttaataaataaaaaataaataaaaagattataaatataaattattattacattaacataataatttacatttattaatttaatactaaatatatatagtaaatgtatcattaaatgaatgtagtaaacatattattaattttcagaaaagttttaatactttttcaccctagaaatatacaaattttttttaattgatataatttttttttgtttatgattcttgtattaatatttaaaccttccgttggagattaacgggtaaaaaatacaaggtttaaacattatataagtaaagttttcttacaacgacaaaacaaaactaattaatatatttacagctaatgatgtttgtttaaaaagtgctaattatatttttttgttctagtcaatgttgtatagttacccaacatataatcagtgacggactttttagttgtggggaaatattcattatatatatatatatatatatgaatcggtgctgcatataatacaatatatacaattttacactgaaaactgtatattattaaaatttatcaggaattatgcttaaatatcttattgtatctatcttattaaagaaatctaattatatctataaaataaaggtttatttcgatcgttttgatatattgtaaatattattttttttgtttgtttttctcgtataaactttaatacatctatatatgtggcttttatatatagggaaaggagaccttgtgacttgctccaaggagcagaactcagaggcattttacgctgctcttggaggattaggtcaatttggggtgataacaagagcaagaatacctctaggacctgcacctactagggcaagtattagtttcccctttcatatagatttcgtaagggtgaaaataaaaataatattttataggactaaaattaaactaatttcatataaacctaaattaaaactcactcaaattatagatgtattaaaatcatatttaatctatatatatgccatttaattttaattgaaacatacatattatatatagatcattttttcctgtaaacttagtcttagacactatacaacttcaatactattaaaattgtaccaaaattaactatcttaaaactaaaaatgagaataagtcgggtaattgacataagtctatgagctcacttgtttaaagcttggtctcatctatctaataaaaaaagttaaacttaaactttttaaaaagtctatttatttatataatttagacttggacttgtgaaaaaacttattaaactgtatagaccggtctaattattcatttaaatatagtaaaacattaaaatatattatacttttattttaatatcttaatatgttaatatatttttatcataaataaaatgaatatttgaaataaatagatctttaaatatgtaataagctaaactatatcatatcttaatttttataacatgccatacctatatatttatataacgtctaacttgacctaacatattatcacccctacttaaaaattatttatctatttatttttaacaaagtttttttcatgtgggtgtttgcaggtaaaatggctccgcctgctatacaacaacttcactgcattttcaagagaccaagaacatttaatatcgttcagtgaaaggaatgacattgctacagcagattatgtagaaggcatgcttctattgaatcagccgccactggatcttctcttttatccagcttctgatcatcaaagggtaacttccttggtaactcaatatggcattatctacatcttggagcttgccaaatactattacaataactctcaggcacatgtcaatgaggtaacttgaaataaaagttgtttttagcatctagttagaaacttcttttatttttattcttatttttttatggacaacatatataatgaatttagtaaagaaatacagagatattctaattgttatatattcatcatacatcaaagatcaaattaatcctcctgattgaaaagaattttgttttcatgaatccaaaagaaacatgtctcaaactcactcaaattgtatggaacccatatattaattaatttatgtacaattcattgttttttactaaattgattatttttcttgtttcttaaataggaagttgcatatttgctgaaagggttaaactttgtacatacatttgtgttcgaaagagatgtgtcatacgaggagtttgtgaacagagtttatcctttggagcaaatgcttaggtcagaaggactttgggaagttcctcacccttggctgaacctctgggttccaagatctagaatctcagattttgatgaaggtgttttcaaggacattgttcttaagcaaaatattactggcggaagttttctagtctacccaacaaacagaagaaacaagtaaattgattagattatttatttttttgtgagtgtcaaattattatctagatcacccgtctcctttaatttacatatcctttctagtgtttccaatatataaaaaaatgacacctcactaaaaaaaataacaaataagagaatttattgttttttaaccacatttttttattgagagaaaacactccacaagaaaaataataataacaacaaaataatttatgtaatttttaaaagaaaaggtcacttaaatttttgcaactctaaaattagttattgaaaaaaaaaacctcaagtctcacatttactagaggaacctcctaagttttttctaaaatgaatatatttctaaaggatatgagacttaaagttttttcaatattaatttacaacattgtgctctgattcaaagtcaagcaatctcctagaataaaagagattgaaaatagcactaacactattggtggggtttgtggtttgtggtctgtggatttaaatttggcatgtggtatttaacagaacttcaacagaggtataaattataaaagatttttttttctgagaaaaagaaataaatggaggtatgttattaaaagagggagtatgaataacaactgtcctaataatactccattgggcctgacagtaggagttgggccataacaattagggacaaaaaataattttggttactaaatttagtcaataattccttttcttagtcacattagatgtttctgttccaatttatttgcttatgtaaatgacttaatttatacatatgtgaggattaaattgaatcaacattatgcttcacaggtgggatgataggatgacaccaattacacctgacgaagatgttttctacgttgtagattttttgcgtgttgctaaaacgtttgatgtggtggacaaactacaggttcaaaacaaacagatactgcggttttgtaatgatgctggtattaagatcacagagtatcttatcgggaacaaaactcatcaacaatgggtggaacactttggcccaaaatggaaactttttgcagatagaaaaactgaatttgatcccaaaaaaatattgtcacctggacatgggattttccagtaaataatgtgctaggtttcagtgaaatctctcattttggaaattcatgaaataaaaatgaaattctgtaccagaaaaaaaaaaaaaaacttgttgtgtaattctgtgccaaacatacattgaattggattgaagttattatgcaattttgtacgaaaaaaaacttatgtatttgattattttatgtttttttattaatgttgaatgttcaaatattctcatgactcacgaacaacggcagatctagaagaaaaaaatggtcgtaagatgtgttgatggtatttaaatgaatgcatgtctacttcaaaatttatttgatagactcatttcgtaaaaaaaaaaaatagaaataacctatttaacaatacttgtttggaaaataaatttaaaaataagaaatttggtcgtttttttatatagaaaatagcattgtttttatgatattttaatgcaattcacgattttatgttgttgggtttttaaataaataaaagttacataaaactttagttttaaattttctttgggactgtgaatggagttaaactctaaaaaagatctataattccaaagtcaggttaccatcaaatattgacatatagcaaaaaaaaaaactactcccttgggaaaattatataaaatattaccttgtcaagagacttgcatttatacaaatgatttatttagcaaaattgttgcatcatgatcaaataggacaaacgttgctaaatcaatgtcactaggcattggcacccttacaagttacaagatacctttaagaaatcgaaaactatttttttcaaaccctttgttttgtgaattaactctttatgagctattttatccctctcaatcggaatataaagagatttttccttacatgacactagtggtctgatcctaagtttgagcttgctcgatgataagcaatgattttaagttttgggtgagaatatataaaaacattggttggagcgttttttgtttttatttttaaagaaaataaaaaataagaatgaaaatatatttatttaaaatttagaaaatattttttctgaatatatttttgaaatagaccaaaaactgaaaataataaatcaacattttcagtcttgtttgaaaaggtgaaaacagcgtggtaccttagagtgctttcttcttaatacattttttttaatcttaaaaatttgaaaatgaaaataaaaaataaacgctcaaatcaagctccacctaaatttttctctattgcaaatgttgaaaaaaatggaaaagcaaaagatctcaaagtaaaataaatatattgtcttttgttacattttgtttcaatgattgtggggaataattgaggtaggataagtggtaggaaaaaatatcaagcaacggataatggtaattgttttatataaaggtttaaatatatttttagtcttttaatttaaaattattattattttttagtccttaaaaacaaatatgcaaattttagtaatctaaaattttaaaatctagttttagtcttgttttgttaactctataacagaggttgtctgtgtggaaaatgatgtgcaattttgtggcgatttctttagtgtgaaaattttgttttaaatttaaatcaaacaaaatgtctcgcaaggcaacaataacgttgttgctgctaacaatcttcgtgtggcaaaatcaacagtggagaaaacgactatcaacaatgttagagaagagttgacgaaggaaaatggggaaaataggacaaacccgaacaaaaaaaccacccttgacttg

SEQ ID NO: 213 - DNA, 7394 bp, Artificial Sequence
  Synthetic polynucleotide
ttaaatcggttcaaaattgttgaatcgatccaaaactagtaaatacagtaggttaattgatttcacttgaaatttaaaaaaaaaaaattaaaatgacgtcattttagtttttttttaaattattataacttatatgacatttttaagtgaagtttactttttattattattaatttatgcatactaggtttctgaaatattatattaaaatattatatatatatatatatatatatatatatatatatatatatatatatatatatatatatatatattattaaaatcaattccacttcgattgagctattaacttttgaaccaatatcttccccagttcaatgaccatccaagtctgaaaacattggttaccatcaacgttacccttccgtgaattggaaaagttaatgcaatataggttgatccaaggataagtcctatggtcccagaaagaaaatcttgagagatccttttgataattacccgagtttttactctctccttttaattcacgaaattggaaacttcaattgctaatataaaaagaattttgttagccaatatcatcagggtattgtcaaagaattacaagaaaaaaaaattataagataacataaaaaaataaaaaacaacataattttatatattttaataaaaaattcttttaatttttttttatcaatattctatagttactggcatttgacatgtaaaaatgtaaacatatgaattgataaaatttgaccaatgtttgaccctgagataggaatccaacggccccagttcaattgcaatcttttatttttactacgtgaaggcccaacaatggagaaccttgtggattttattgctgagaatctgtggttacgatgatgacacaccaacacaatcacagaaagcaagtaccgtttggaaggcctaacacttcattaattgcttcattaaatttattttactttctagctgctcaatttaattgctttacacaaatacttcatgacgtttcagaaggagggccaaatacaatctctacaatggttccatcgtatctttgaatttgacatttagcatccctccctttgcacaatgtacaatttgcattttgaatatttttttctcaccttcatatcgtgggactacttctataaccatcctggtgaaaataaataaagcgagggaattacgtaattaaacatatttaaatttctctctcctctgtttaattaatttatcaaaaacaaatatgtgtgcgagtatttaaaaatgtgtaaagtattattattttttaatttttcttttttccttctcatcaatgataaatatactttttaatataaaaatcaaacaataactataaaaaaaacatcttcacttcaattcaacattaaataaaaaataatccctgctttgttattttttacccaccaattatcatatttgttatttattatttttttatgttcttgctataaaggaaatcactatttgactcacacaaaactataaaggaatcaaataatcaattattatttaaaaactctattaaaataacaattacaacaaaatcccttatttttttcttccttatcattattaaaccttcccattctctctttctatctctacatgtttttctcaaattaaatattttctatatcctcctttatcatgcaaattaaagtcctcttccattctatatatagccgctacctcctccacctcctttccccactacaacacacaaacaccaacaaccaaatcaatccatccaccctagaaacaacaaagcactctctcttctctcattctattatcttctctcatcctcttattctctccaaaccaacaaaaaaaaaatggttgctgagaactacccttctcccacatacttcatcctccttaaccataacacgtttgatctccacagtgggcaaaacctcccaatggacgaaggccctgtcgctgcctccggaactcgcctccgtctccctcgacgacaccatcttctgcaagctccgtgacgacccagaggccctccagggaagggcctccagggactacgggaacctcgtccgcgaggttcccttggcagtcttccacccagcctcagcgagcgacatcgcgaggctgatcaagctgtcgtacaacggctctgtccccttcaagattgcggcgagggggcaagggcactcgacaaggggccaggcgatggcacgtgagggggtggtggtggacatggcggggttcagagagagagggaatggagtggggataagggttgtgagtagtgtggaccctaataataagaatggttactactattatgcggatgttggaggggaacagttgtggatcgatgtgctacacgccacgctcgagcatggacttgcacctatgtcctggactgattacttgtacttgacgctgggagggactctctccaatgctggcatcagtggccagacattccgctatggtcctcaaatcaccactgtccgggaaatggacgtaatcaccggtaagaaaactttccattcaaccagttaacttacatgtttttagttttttagcttccaatatccaatagtttataacttgtaagcttcaattttatgttaatttataagctagttttaccctacttttgaaaattcaaggattttggtactacaataactcccttgtcaaactcgttcaattgttggcttagtatcaagtagactcttggatttttaggtgtactttaacaaccatgttaatttaattgatcagggttttaatattatggaaattggccattggacaacttggaatggaaggaaagcgggagatggaaagggaaaagaaattaattagaataattgttaatattagttgcgtgaaaaaaattaaatttgctgaattaaattatggttcatcacgactctatttgtggcaacaccaacgtgccgttttcagaacttcattgcaacagcggttatagtggcgtttattcaattcatattttaatgcatcagactgtgattgcgattgaaattttatgaaatcttgttttataaacttgttcttttgattaggaaacttgattctattttatatatatttaatgtaacgccgaattaatggttgataaacgagtctttgtctaaaattttggcgaatgttagcaagcgttttccacgtggtcccgtacgtgtttgaaaaattcttaatcatggaatcagttcacacgggcagtcatagactcatagactccaattcttgattaattgttttcttattaatattggtccatggtcttattttggtcaattctttttattaaaaataaacgggctgctgaattttaatttactcaagtgtttgttaatgaatatgtgtgcatgcatgcaattatatatatatatatatattactattatttatttgtgttttaatcaaattttggtttggttcaggaaagggagaatttgtgacttgctctcagcagacgaattcggagttgtttcacgcggttcttggaggcttaggacaatttggaattataacaagggcaagaattgctcttgcgccagctccgaagagggtacgtttaaaatcttcggaattgactaggacttgtcttgttgcttcttcctccaacatctctcatatagtaacgcaaatttctaaatatgttacattattaattcaaccaccaagctttgcggaagcatcaaatgtcgttgtcctgaaagcttcatgtcatcatttttcttggcacccatatacacacacatacgtttcacattgtgtcagtgcatattagtcatccatgaaagacacatgtacaaatgaaaacgagaggagttatattaaaatgtgtgttggaaaaatatatatcatattttcataagtcttaattttgaaattaatatacagtaaccctttgagaccttagcaattaagccaataaaaaggctcgtattaaccccaaccaacaactattagaaaatactaacaagtataggtgtatacataaatgattcatttgaattttagtaccttaattatttaactttatccttctatttgacgggactcgttgcataagccatacatacataatcatgcgttcattattgtttttcattatgagttaatgagttgattgtatgaactaatggtgaatttttgttggcaggttaaatgggtgagacttttgtacaatgacttttctgcttttaccaaagaccaggaacaactaatatctatcactggaaggaaacaaaatgtttcactggattatttggaaggattgctgctaatgcaccaaggacccataaataattggagatcttctttcttccctttagccgaccatgcccgaataatttcgctagtaactaaacacagcgtcctctattgcctagaagttgccaaatattatgatggccaaaatgaaaacaatgtggacaaggtaccatctccattcatgtgcatttgccttgatgatgtttcttctattttttcttttaatgttttgatctcaccttatataataaccctttatcacactcaatcttgttatatttttaagagtttaatgataatattatgattttgttgtgaaaaaagagagtttaattgttattatataatcacaaattatcattaatatgacttttaaaataattaataatataaaaattaataaatttatcgtatttaatgagttataattaaatgatcatataaaattattttatattattaacatatagtttttttttctatttttaatatttgttttactataagttgttatattttcaatcttttttctagtataagttttaataatcaatattgtaagtaatattctcatttttcatgttgtgtaggaactccaagttttactacaaggattgagctatatccctggattttactatgaaaaagatgtctcatattttgagttcttgaatagagtccgaagtggagagttgaagctacagtcacaaggactatgggatgttcctcacccgtggcttaatttgtttataccgaaatctcaaatcatggaatttgactcgggcgtgttcaagaatatcatccttaaacgaaacatcaccacaggacctgtcttggtttaccccatgaatagaaacaagtaattgagcttaactaactaatctcaacttatgttgttatcattaggaaaaatgttaattggtacgaaaactatatataccactattttcatttaaattcatgaaagtgaaatttctctttcctaaaacaaattctttctcttaaaatgaatttttgtttttctcaatctccatcaattacttatttccttttttgaatgtttgaaaagtcattcacaacattttcttcataaaagggttattcgtaccaatttaaatagaattgccgttattatcagatgtacaattcttctcttcactcacttcttttccattaaaattgtaaaaaaaaaataaaaaaatcaggtgggacaataggatgtcagcatcaatacccgatgaggatatcttctacacagttggatttttgcattcaagtgggtttgataattggaaggcctatgatgctcaaaataaagaaattctacaattttgtaacgttgctgggatcaaggttaagcaatatcttccccactatcgcacacaagaagattgggcaaaccattttggccctaaatggaggacttttgtagaaagaaaacaccagtttgatccaagaatgattctatcacctggacaaagaatctttaacaattaaaatagctttaaaaatatatattcccccccccccccccccccccaaaaaaaaaaaaattatataatatggtgggactacccaagttagctagctggctgatcacaagtgtgcacataggacccagaattcagatgatagcctttgtacttgtttttgttaagagggtggggttaaaagctgcatgactttggcatatatgtagatcaggttacacatactttagatacgttaggttgacaaaatcatgtgtgaaataagatgcacacagctagctgtgtacctttctttctctctgtccctcaatttgtctatcactaaaaagatttctatatagtttagaacctagtgaagagaaagaaaaaaccattatattgaggatttaattttatcacgttctaatcctatacattaatattcttaaatgtgcaatgagtgtgctcggtgccttaatgattctttatctttgttaattgttatattgtagggttttgtttttgccttcctaattttgtaacaggggcacccctagcaataattgagatcctaggttaactaaggaacagcattattgtgtctaaattgagattcctagctgtatgccataataataaatcatcgtaggttgctagatagatgtgatagcgccaaatgccttccaatactataatctccattgcaagatccttcgttgtgattgtgtagaaaagattacgctgctttacaagagaatactccaagaaagcaagtgattgctccttaatataaagaatcatgcaataaacaaatggtgtcgtaatccataaagtgtatttaatatttgatgaaagagtagtgtagacatcaaacaaaataaagtttgatgcaattcgaattatagatacttgattaatctctaaattatgttgagacaatcatatttgaatttgataagactattatgaacgataaaaaatattataaataataaaaaaatttcatcaaacatttaatacaattatataccttactcaaatttgaaaacctgtacatataggaaaaaaacctttactaaaagaggttaaactcaccatacggatttttatatgtcgaagggatctttaattgtccatcggaaaacatcctaattcataaaaaaggaaagaaagtttagacatgaataattacggaccaatgaatgcaacctacgtctctcaattttaaggagaatttaggaatattatagtatatcactgaaagtacacacaagtggcaatgatgaatattttaatttaaagttttaattggattcgaaattaatcccttcttttttccagaaaaaataataatcatcgagtaatcaagacaatttcccaagtagacaacaagaatacaaaagagaatacgtgacttcgtttcaccatagaaaagaaggaatgcaataacgatgataataattataaaatgaaattgacaaaatatctaaatgcctgtagatatttctacagcgaatgataagtgtttttccattaaaaataagtttcttttgttaagaatttctaacatttttagttccaaaatataggaatgaagccaataagtaagtaagaatttctaacgtctgaaag

SEQ ID NO: 214 - DNA, 7388 bp, Artificial Sequence; identical to SEQ ID NO: 210
  Synthetic polynucleotide

SEQ ID NO: 215 - DNA, 7392 bp, Artificial Sequence
  Synthetic polynucleotide
ttaaatcggttcaaaattgttgaatcgatccaaaactagtaaatacagtaggttaattgatttcacttgaaatttaaaaaaaaaaaattaaaatgacgtcattttagtttttttttaaattattataacttatatgacatttttaagtgaagtttactttttattattattaatttatgcatactaggtttctgaaatattatattaaaatattatatatatatatatatatatatatatatatatatatatatatatatatatatatatatatatattattaaaatcaattccacttcgattgagctattaacttttgaaccaatatcttccccagttcaatgaccatccaagtctgaaaacattggttaccatcaacgttacccttccgtgaattggaaaagttaatgcaatataggttgatccaaggataagtcctatggtcccagaaagaaaatcttgagagatccttttgataattacccgagtttttactctctccttttaattcacgaaattggaaacttcaattgctaatataaaaagaattttgttagccaatatcatcagggtattgtcaaagaattacaagaaaaaaaaattataagataacataaaaaaataaaaaacaacataattttatatattttaataaaaaattcttttaatttttttttatcaatattctatagttactggcatttgacatgtaaaaatgtaaacatatgaattgataaaatttgaccaatgtttgaccctgagataggaatccaacggccccagttcaattgcaatcttttatttttactacgtgaaggcccaacaatggagaaccttgtggattttattgctgagaatctgtggttacgatgatgacacaccaacacaatcacagaaagcaagtaccgtttggaaggcctaacacttcattaattgcttcattaaatttattttactttctagctgctcaatttaattgctttacacaaatacttcatgacgtttcagaaggagggccaaatacaatctctacaatggttccatcgtatctttgaatttgacatttagcatccctccctttgcacaatgtacaatttgcattttgaatatttttttctcaccttcatatcgtgggactacttctataaccatcctggtgaaaataaataaagcgagggaattacgtaattaaacatatttaaatttctctctcctctgtttaattaatttatcaaaaacaaatatgtgtgcgagtatttaaaaatgtgtaaagtattattattttttaatttttcttttttccttctcatcaatgataaatatactttttaatataaaaatcaaacaataactataaaaaaaacatcttcacttcaattcaacattaaataaaaaataatccctgctttgttattttttacccaccaattatcatatttgttatttattatttttttatgttcttgctataaaggaaatcactatttgactcacacaaaactataaaggaatcaaataatcaattattatttaaaaactctattaaaataacaattacaacaaaatcccttatttttttcttccttatcattattaaaccttcccattctctctttctatctctacatgtttttctcaaattaaatattttctatatcctcctttatcatgcaaattaaagtcctcttccattctatatatagccgctacctcctccacctcctttccccactacaacacacaaacaccaacaaccaaatcaatccatccaccctagaaacaacaaagcactctctcttctctcattctattatcttctctcatcctcttattctctccaaaccaacaaaaaaaaaatggttgctgagaactacccttctcccacatacttcatcctataaccataacacgtttgatctccacagtgggcaaaacctcccaatggacgaaggccctgtcgctgcctccggaactcgcctccgtctccctcgacgacaccatcttctgcaagctccgtgacgacccagaggccctccagggaagggcctccagggactacgggaacctcgtccgcgaggttcccttggcagtcttccacccagcctcagcgagcgacatcgcgaggctgatcaagctgtcgtacaacggctctgtccccttcaagattgcggcgagggggcaagggcactcgacaaggggccaggcgatggcacgtgagggggtggtggtggacatggcggggttcagagagagagggaatggagtggggataagggttgtgagtagtgtggaccctaataataagaatggttactactattatgcggatgttggaggggaacagttgtggatcgatgtgctacacgccacgctcgagcatggacttgcacctatgtcctggactgattacttgtacttgacgctgggagggactctctccaatgctggcatcagtggccagacattccgctatggtcctcaaatcaccactgtccgggaaatggacgtaatcaccggtaagaaaactttccattcaaccagttaacttacatgtttttagttttttagcttccaatatccaatagtttataacttgtaagcttcaattttatgttaatttataagctagttttaccctacttttgaaaattcaaggattttggtactacaataactcccttgtcaaactcgttcaattgttggcttagtatcaagtagactcttggatttttaggtgtactttaacaaccatgttaatttaattgatcagggttttaatattatggaaattggccattggacaacttggaatggaaggaaagcgggagatggaaagggaaaagaaattaattagaataattgttaatattagttgcgtgaaaaaaattaaatttgctgaattaaattatggttcatcacgactctatttgtggcaacaccaacgtgccgttttcagaacttcattgcaacagcggttatagtggcgtttattcaattcatattttaatgcatcagactgtgattgcgattgaaattttatgaaatcttgttttataaacttgttcttttgattaggaaacttgattctattttatatatatttaatgtaacgccgaattaatggttgataaacgagtctttgtctaaaattttggcgaatgttagcaagcgttttccacgtggtcccgtacgtgtttgaaaaattcttaatcatggaatcagttcacacgggcagtcatagactcatagactccaattcttgattaattgttttcttattaatattggtccatggtcttattttggtcaattctttttattaaaaataaacgggctgctgaattttaatttactcaagtgtttgttaatgaatatgtgtgcatgcatgcaattatatatatatatatatattactattatttatttgtgttttaatcaaattttggtttggttcaggaaagggagaatttgtgacttgctctcagcagacgaattcggagttgtttcacgcggttcttggaggcttaggacaatttggaattataacaagggcaagaattgctcttgcgccagctccgaagagggtacgtttaaaatcttcggaattgactaggacttgtcttgttgcttcttcctccaacatctctcatatagtaacgcaaatttctaaatatgttacattattaattcaaccaccaagctttgcggaagcatcaaatgtcgttgtcctgaaagcttcatgtcatcatttttcttggcacccatatacacacacatacgtttcacattgtgtcagtgcatattagtcatccatgaaagacacatgtacaaatgaaaacgagaggagttatattaaaatgtgtgttggaaaaatatatatcatattttcataagtcttaattttgaaattaatatacagtaaccctttgagaccttagcaattaagccaataaaaaggctcgtattaaccccaaccaacaactattagaaaatactaacaagtataggtgtatacataaatgattcatttgaattttagtaccttaattatttaactttatccttctatttgacgggactcgttgcataagccatacatacataatcatgcgttcattattgtttttcattatgagttaatgagttgattgtatgaactaatggtgaatttttgttggcaggttaaatgggtgagacttttgtacaatgacttttctgcttttaccaaagaccaggaacaactaatatctatcactggaaggaaacaaaatgtttcactggattatttggaaggattgctgctaatgcaccaaggacccataaataattggagatcttctttcttccctttagccgaccatgcccgaataatttcgctagtaactaaacacagcgtcctctattgcctagaagttgccaaatattatgatggccaaaatgaaaacaatgtggacaaggtaccatctccattcatgtgcatttgccttgatgatgtttcttctattttttcttttaatgttttgatctcaccttatataataaccctttatcacactcaatcttgttatatttttaagagtttaatgataatattatgattttgttgtgaaaaaagagagtttaattgttattatataatcacaaattatcattaatatgacttttaaaataattaataatataaaaattaataaatttatcgtatttaatgagttataattaaatgatcatataaaattattttatattattaacatatagtttttttttctatttttaatatttgttttactataagttgttatattttcaatcttttttctagtataagttttaataatcaatattgtaagtaatattctcatttttcatgttgtgtaggaactccaagttttactacaaggattgagctatatccctggattttactatgaaaaagatgtctcatattttgagttcttgaatagagtccgaagtggagagttgaagctacagtcacaaggactatgggatgttcctcacccgtggcttaatttgtttataccgaaatctcaaatcatggaatttgactcgggcgtgttcaagaatatcatccttaaacgaaacatcaccacaggacctgtcttggtttaccccatgaatagaaacaagtaattgagcttaactaactaatctcaacttatgttgttatcattaggaaaaatgttaattggtacgaaaactatatataccactattttcatttaaattcatgaaagtgaaatttctctttcctaaaacaaattctttctcttaaaatgaatttttgtttttctcaatctccatcaattacttatttccttttttgaatgtttgaaaagtcattcacaacattttcttcataaaagggttattcgtaccaatttaaatagaattgccgttattatcagatgtacaattcttctcttcactcacttcttttccattaaaattgtaaaaaaaaaataaaaaaatcaggtgggacaataggatgtcagcatcaatacccgatgaggatatcttctacacagttggatttttgcattcaagtgggtttgataattggaaggcctatgatgctcaaaataaagaaattctacaattttgtaacgttgctgggatcaaggttaagcaatatcttccccactatcgcacacaagaagattgggcaaaccattttggccctaaatggaggacttttgtagaaagaaaacaccagtttgatccaagaatgattctatcacctggacaaagaatctttaacaattaaaatagctttaaaaatatatattcccccccccccccccccccccaaaaaaaaaaaaattatataatatggtgggactacccaagttagctagctggctgatcacaagtgtgcacataggacccagaattcagatgatagcctttgtacttgtttttgttaagagggtggggttaaaagctgcatgactttggcatatatgtagatcaggttacacatactttagatacgttaggttgacaaaatcatgtgtgaaataagatgcacacagctagctgtgtacctttctttctctctgtccctcaatttgtctatcactaaaaagatttctatatagtttagaacctagtgaagagaaagaaaaaaccattatattgaggatttaattttatcacgttctaatcctatacattaatattcttaaatgtgcaatgagtgtgctcggtgccttaatgattctttatctttgttaattgttatattgtagggttttgtttttgccttcctaattttgtaacaggggcacccctagcaataattgagatcctaggttaactaaggaacagcattattgtgtctaaattgagattcctagctgtatgccataataataaatcatcgtaggttgctagatagatgtgatagcgccaaatgccttccaatactataatctccattgcaagatccttcgttgtgattgtgtagaaaagattacgctgctttacaagagaatactccaagaaagcaagtgattgctccttaatataaagaatcatgcaataaacaaatggtgtcgtaatccataaagtgtatttaatatttgatgaaagagtagtgtagacatcaaacaaaataaagtttgatgcaattcgaattatagatacttgattaatctctaaattatgttgagacaatcatatttgaatttgataagactattatgaacgataaaaaatattataaataataaaaaaatttcatcaaacatttaatacaattatataccttactcaaatttgaaaacctgtacatataggaaaaaaacctttactaaaagaggttaaactcaccatacggatttttatatgtcgaagggatctttaattgtccatcggaaaacatcctaattcataaaaaaggaaagaaagtttagacatgaataattacggaccaatgaatgcaacctacgtctctcaattttaaggagaatttaggaatattatagtatatcactgaaagtacacacaagtggcaatgatgaatattttaatttaaagttttaattggattcgaaattaatcccttcttttttccagaaaaaataataatcatcgagtaatcaagacaatttcccaagtagacaacaagaatacaaaagagaatacgtgacttcgtttcaccatagaaaagaaggaatgcaataacgatgataataattataaaatgaaattgacaaaatatctaaatgcctgtagatatttctacagcgaatgataagtgtttttccattaaaaataagtttcttttgttaagaatttctaacatttttagttccaaaatataggaatgaagccaataagtaagtaagaatttctaacgtctgaaag

SEQ ID NO: 216 - DNA, 3658 bp, Artificial Sequence
  Synthetic polynucleotide
cttctcatccaatctaatagcaggatacgcgatgtttacattccgacaatagtggactcagtaccaacaccataaaaaaaaataaacaactagttatgtgtccataggggcaaaagaaaaagaaatacgcactactgtggaaagaagaaaaaaagcaataaggacttatttctatatccggaaaaagcatatatccttaaattggttaatgaacaaaaacttgaaacatgtctttccttcatgtttttgttgtaacttataacataacatgtaattgtttgtggttaccactgtttggaaaaagttgaagatttgtgagatctctcattgatgttacttttcctcttcaacttggcttctgtgtcactgtacatgtgatgcctttggcgtctctcttccttccaagtaagcagtccacatacgcattctcctcgtatcgtatgtcataagtcatgactgatcaacaatgctacgttgaccaagccaccacccacaaactcctttaaattctggcccaaacccttaagttcctgcattctccaatccatcactttctccttttcctcgtgttcacaaaatcacgctgcttaattattccttcaactaccatcatatcataccttctcaacagaaaaataaaaataaaaatgagatacatccttggagaacacaacattctgttcctcaaaagcttcgcctcgatattattccttagttgcatagccattcggcttaacttgtgtctttccagcatcccttcttcactgaaatcaattccccttgaagggcatttaaaatttgatcaagttagcctaagccatgcagcaagggactttggcaacaggtaccaatataatccaatggcagtgctgcaaccagaatcagtttctgatattgtagccaccataaggcatatctggctgatgggtcctggctcccacctcaccattgcagcgaggggccacggccactcgctgcagggtcaggctcaagcccatggaggacttgtgatcaacatggaatcactcaaggtcccagaaatgcaggtatatcgctaaatattaattgttaatcgttaattttttgttagctaggcaatcaaatccacaatcttttcctctcttccttcttcttatacaaccaaactaaccttataactccaatgcagatacatgttgatgagggaaacaagtctcctccatacgtggatgtctcaggtggcgagttgtggataaacatattgcatgagactctaagatacggcttggcgccaagatcgtggacagactacctgcatctcacagttggtggcactctctccaacgctggtgtcagtggtcagacatttaggcatggtccccagataagtaatgtacagcagctcgagattgttacaggtttgtgaaaaagagaatgaataataattgtttgtcttttctgaataataattcatttgatactggctgcatataagttttctaataaataatttttttcccctactttgatgagtaaaacatggtcaatgaatggatgcaggaacaggggaggtgttgaactgttccgcggagaataatggggatctctttcatggtgttctagggggcttggccaatttggcattataacccgggcaagaattgtcctagaaccagcacctaccatggtaatgcatcactcatcagtgactataccaaaacaagcttctttttttttggttttaatgtgtgctttgggtcatgactgaaaattttctatttattggaacaggtaaaatggattagagtgctgtactcagatttcacagcattcacaagagaccaagagaggttaatatctgcagaaaagacttttgactacattgaaggatttgtgataataaacagaactggtcttctaaataactggcgattatccttcaacccacgagacccggtccaagctagtcatttcaagtcggatggaagaactctcttctgccttgaaatggccaaatacttaaacgtggaagaaatcgatgcagcaaatcaggtgaggccagcaacactcaatctaatagatttttttgaaaataaagggataattaactccaaggttttaaaatatgagaccgtgggttgcaacatcaaagttttctaactctttgcgacccgaattgagactatgtcgatagcatttgtctatgatttgcccgtgatatcaacaaacacgaccaaaccacatgcgactgcgacctatatttaaaaccttgattaactcattagtgataatctttctttaggaaagaaaataaaagaggctaaatcaaccgtatctcacttttgtgtgtgcaggaagttgaggaacatttgtcccgtttaagctacatcccatcaactcttttttcaacagaagtcacatttgtagatttcttagacagggtgcacatatccgaggtcaagttgcgttcaaaaggcttgtgggatgttccacatccatggctcaatcttctaatacccaaaagccaaatactcaactttgcacaagtcgtcttcgggaacatcctatcagaaactagcaacggccccgtccttatctacccagtaaacaaatcaaagtaatgaatggttcagaaaaaaacatactattaactctagaaacaaatattttagccgtcaatattttttaattgacatgttttgttttgtttgcaggtgggacaacagaacttctgttgtgattccagaggaagatattttctacttagtggcatttcttacatctgcagttccatcttcaaatggaactgatggcctagaacacatactaagtcagaacaaaagaatattagaattctgtgaaagagcacaacttggagtgaagcagtatttgccccactacaacacacagcaagaatggagggcccattttggtcctcaatgggagacttttctgctgagaaagtccgtttatgatccattagcaatactcgcccctggccaacgtatatttcaaaaagcaataaccttctcatgaccacatttttattattaattattaaaaatctgaaaaaaaaaaagagaagaaaagtccttcatggcatgtgccaaaatgaaaaaaaaatgttatatgatccagacaggttttgacattgaccatacagaatgcaattgcaaaggaagaaggttcattgatagtagagaaaaagagggagaaaaagagattacaaaatgatgactggtgagatttgtatgccttgcaggttaatgaggaaagttgtcagtgtatgtaggtatgtaccattactgatggaaaaattgccttacgtgctgagtgtagcaccaaggcagcagggtccggctgagattagatcaacaaaacacattaatcattgtagggtttccaaagaacttataaatattatcagcgctagagccaatgtatagtactatcaattttgtaaacactcccttatttgttctctgtctcacatgtatccaaattcattaagattataattaaatacagatatttatgcatccaccacaaaaagatatcaatacgttcgcaacaaatacagataagatgatatataatgctgagtaacaaatactactattctagaaaattgcggaaaatgatataaaaatgggtatgcctaccctgaaggatgatgaat

SEQ ID NO: 217 - DNA, 8254 bp, Artificial Sequence
  Synthetic polynucleotide
ctacttctagaatgacaactactcctatggcaatatcaattgttagcggtggttcccttaagttcgagactaagggcagtctccaaaaggaagaaaggaaataacaaacttaagcctgaatgttctacgttttatttagtgtctcttgatatttaaaggtctatcaaatatgtataataaccgcacttccactataataaccacactcccactacgataatcgctacaataaccaccacaataactacttctaggatgacaactacctctatataagtttccatgacagaacatcttcttcctaacaccttacctatcacaaatgcttctcctctcggtgtcagagagtactattgattccctaagttctgacggtgtctttttctaaccaaagatccacttttcgaaggtcccgagccaattcgatgagagctcggaggcatagaactcggtttagtcacttatgccatgcttcatttcgtcgcgcgtactttaccaatcaacacacgccatcgagattgatctgcaagtgcagattacgtaagcgagaaaggatttgcaatggaattcacaaatcgcacaatcagagaacaggataagtgtactgctaattatgagcgccagggagtgtagattcatgtcttaggttttaaaattagaacagaataaatatgaaaattgttttttactttctatattttatattttaatttttttttagtttttattattagtaatattgttaattataattaattataaaaattttaacaagtaatttattactaatttatcataagataatttataataaaaaaataattgataatttataattaatttataactaattatttttatattttgtttagtaaagactaaaaggtaattaaaatgtaaattatagagattaaaatatcatttttaaactataagaactaaaaaagaattaaaatacaaactataagacaaaaaagatcacttttaaactataggaactaaaaaaattacttttaaattatatggactaaaaaataccaatcgtaaaattataggaactaaataaataatataaccttaaattttttattttaagatcaattttttaaaaaattaatgttaatcatgatattttatttataaaatatcaaaactcattttgtaaaatggattttcatcaaaataaacgttcactttgctatggtaaatcttgttttgtagtattttggttgttctgacccaaatgacccaaatgcaggctagtggacaatgacattgattgttttgtatatgggttgggtgtcccttgtatcctattgatatattccttttgccttattaagaaaaattgcattagaaactactatatattaaatgctctaacaattaatgattaaattgacaccacatcctgtttgactctccacttttcttttattggtactctctattttagtctgctctttatatacatgttaacttaaagacagcaaatttaccaaagtaacttatcttctctcttgaaagaaaaatgccacagaggaatttagtactattttccacaactatggttgtgctattgctatctagcatagtgctcacacaagcacaaccacgatcatggtcagcattccaagcatccaaagaactagccacaaagcttagtcgtaaccctcaaacctttccacatagttcacaaaaccccagtggcaattttcaatccatcttctgttagtgacatcttggccttgatacatttctcaaactctcttcctaacccattccccatagcccctagagggaaagcacactctgttcatggacaagccatgacaaaagatggggtggtgttgaatatgactaacctcaatagcagttttcaaaatgggttaggggttttggtgtctgcttgtgatggaaaaggtccattgatttgttatgctgatgtaggtggtggccaaatgtggatcgatgtcttgcatgcatcccttgaacgtggactcacacctttgtctttgactgattatatgtatgccactgttgggggcacactatctaatgctggcatgggtggcatgtcctttcgatttggacctcagatctctaatgttcttgaattggatgttattacaggtatgactcactcaattttatcaattaattttcttccatactcatctacacgcttgttcgaagtgaaacatttaactgaattttttttatcttggatatcacaattgtgtaatttttcgtctagatttgtgattatgttaattcaatctgtatatcttaataattatattaaagtccctccctccttcaattatctgtcaaatatttaacgaaatatatttatgtgacatttgagaatgttgatgggtttatatgtgttattttagtcgattagattttacgtgtgaagttttagtgtctcccaaattcttattaacattgtgggaaaaaatgagaaaacaatcgcagaactggagtttgattccagattattattattatttagtaattttattattatctatatcataatagtatatttattaactcatttaatatcatatttattacatatatttagtgtaataatagtatatttattacattctttttacatacaaaaagtcagaaagacttaaaagcttctacaaaaagaaatacctgttatatcagctcttaaagaattacatatgaaatcctacgcatttattacacacacacaaatatatatatatatatatacttaaacagaaatatgaattgttattatatttataattagtatttatattaatagaacaatttatagtttatactatggaataaatttttaaatataaatttattatttatattgatatactcatttatagtttttactaagatataagtttataaatataaatttgcacctcttgtgattttgaactggttttttaataaataaaaaataaataaaaagattataaatataaattattattacattaacataataatttacatttattaatttaatactaaatatatatagtaaatgtatcattaaatgaatgtagtaaacatattattaattttcagaaaagttttaatactttttcaccctagaaatatacaaattttttttaattgatataatttttttttgtttatgattcttgtattaatatttaaaccttccgttggagattaacgggtaaaaaatacaaggtttaaacattatataagtaaagttttcttacaacgacaaaacaaaactaattaatatatttacagctaatgatgtttgtttaaaaagtgctaattatatttttttgttctagtcaatgttgtatagttacccaacatataatcagtgacggactttttagttgtggggaaatattcattatatatatatatatatatatgaatcggtgctgcatataatacaatatatacaattttacactgaaaactgtatattattaaaatttatcaggaattatgcttaaatatcttattgtatctatcttattaaagaaatctaattatatctataaaataaaggtttatttcgatcgttttgatatattgtaaatattattttttttgtttgtttttctcgtataaactttaatacatctatatatgtggcttttatatatagggaaaggagaccttgtgacttgctccaaggagcagaactcagaggcattttacgctgctcttggaggattaggtcaatttggggtgataacaagagcaagaatacctctaggacctgcacctactagggcaagtattagtttcccctttcatatagatttcgtaagggtgaaaataaaaataatattttataggactaaaattaaactaatttcatataaacctaaattaaaactcactcaaattatagatgtattaaaatcatatttaatctatatatatgccatttaattttaattgaaacatacatattatatatagatcattttttcctgtaaacttagtcttagacactatacaacttcaatactattaaaattgtaccaaaattaactatcttaaaactaaaaatgagaataagtcgggtaattgacataagtctatgagctcacttgtttaaagcttggtctcatctatctaataaaaaaagttaaacttaaactttttaaaaagtctatttatttatataatttagacttggacttgtgaaaaaacttattaaactgtatagaccggtctaattattcatttaaatatagtaaaacattaaaatatattatacttttattttaatatcttaatatgttaatatatttttatcataaataaaatgaatatttgaaataaatagatctttaaatatgtaataagctaaactatatcatatcttaatttttataacatgccatacctatatatttatataacgtctaacttgacctaacatattatcacccctacttaaaaattatttatctatttatttttaacaaagtttttttcatgtgggtgtttgcaggtaaaatggctccgcctgctatacaacaacttcactgcattttcaagagaccaagaacatttaatatcgttcagtgaaaggaatgacattgctacagcagattatgtagaaggcatgcttctattgaatcagccgccactggatcttctcttttatccagcttctgatcatcaaagggtaacttccttggtaactcaatatggcattatctacatcttggagcttgccaaatactattacaataactctcaggcacatgtcaatgaggtaacttgaaataaaagttgtttttagcatctagttagaaacttcttttatttttattcttatttttttatggacaacatatataatgaatttagtaaagaaatacagagatattctaattgttatatattcatcatacatcaaagatcaaattaatcctcctgattgaaaagaattttgttttcatgaatccaaaagaaacatgtctcaaactcactcaaattgtatggaacccatatattaattaatttatgtacaattcattgttttttactaaattgattatttttcttgtttcttaaataggaagttgcatatttgctgaaagggttaaactttgtacatacatttgtgttcgaaagagatgtgtcatacgaggagtttgtgaacagagtttatcctttggagcaaatgcttaggtcagaaggactttgggaagttcctcacccttggctgaacctctgggttccaagatctagaatctcagattttgatgaaggtgttttcaaggacattgttcttaagcaaaatattactggcggaagttttctagtctacccaacaaacagaagaaacaagtaaattgattagattatttatttttttgtgagtgtcaaattattatctagatcacccgtctcctttaatttacatatcctttctagtgtttccaatatataaaaaaatgacacctcactaaaaaaaataacaaataagagaatttattgttttttaaccacatttttttattgagagaaaacactccacaagaaaaataataataacaacaaaataatttatgtaatttttaaaagaaaaggtcacttaaatttttgcaactctaaaattagttattgaaaaaaaaaacctcaagtctcacatttactagaggaacctcctaagttttttctaaaatgaatatatttctaaaggatatgagacttaaagttttttcaatattaatttacaacattgtgctctgattcaaagtcaagcaatctcctagaataaaagagattgaaaatagcactaacactattggtggggtttgtggtttgtggtctgtggatttaaatttggcatgtggtatttaacagaacttcaacagaggtataaattataaaagatttttttttctgagaaaaagaaataaatggaggtatgttattaaaagagggagtatgaataacaactgtcctaataatactccattgggcctgacagtaggagttgggccataacaattagggacaaaaaataattttggttactaaatttagtcaataattccttttcttagtcacattagatgtttctgttccaatttatttgcttatgtaaatgacttaatttatacatatgtgaggattaaattgaatcaacattatgcttcacaggtgggatgataggatgacaccaattacacctgacgaagatgttttctacgttgtagattttttgcgtgttgctaaaacgtttgatgtggtggacaaactacaggttcaaaacaaacagatactgcggttttgtaatgatgctggtattaagatcacagagtatcttatcgggaacaaaactcatcaacaatgggtggaacactttggcccaaaatggaaactttttgcagatagaaaaactgaatttgatcccaaaaaaatattgtcacctggacatgggattttccagtaaataatgtgctaggtttcagtgaaatctctcattttggaaattcatgaaataaaaatgaaattctgtaccagaaaaaaaaaaaaaaacttgttgtgtaattctgtgccaaacatacattgaattggattgaagttattatgcaattttgtacgaaaaaaaacttatgtatttgattattttatgtttttttattaatgttgaatgttcaaatattctcatgactcacgaacaacggcagatctagaagaaaaaaatggtcgtaagatgtgttgatggtatttaaatgaatgcatgtctacttcaaaatttatttgatagactcatttcgtaaaaaaaaaaaatagaaataacctatttaacaatacttgtttggaaaataaatttaaaaataagaaatttggtcgtttttttatatagaaaatagcattgtttttatgatattttaatgcaattcacgattttatgttgttgggtttttaaataaataaaagttacataaaactttagttttaaattttctttgggactgtgaatggagttaaactctaaaaaagatctataattccaaagtcaggttaccatcaaatattgacatatagcaaaaaaaaaaactactcccttgggaaaattatataaaatattaccttgtcaagagacttgcatttatacaaatgatttatttagcaaaattgttgcatcatgatcaaataggacaaacgttgctaaatcaatgtcactaggcattggcacccttacaagttacaagatacctttaagaaatcgaaaactatttttttcaaaccctttgttttgtgaattaactctttatgagctattttatccctctcaatcggaatataaagagatttttccttacatgacactagtggtctgatcctaagtttgagcttgctcgatgataagcaatgattttaagttttgggtgagaatatataaaaacattggttggagcgttttttgtttttatttttaaagaaaataaaaaataagaatgaaaatatatttatttaaaatttagaaaatattttttctgaatatatttttgaaatagaccaaaaactgaaaataataaatcaacattttcagtcttgtttgaaaaggtgaaaacagcgtggtaccttagagtgctttcttcttaatacattttttttaatcttaaaaatttgaaaatgaaaataaaaaataaacgctcaaatcaagctccacctaaatttttctctattgcaaatgttgaaaaaaatggaaaagcaaaagatctcaaagtaaaataaatatattgtcttttgttacattttgtttcaatgattgtggggaataattgaggtaggataagtggtaggaaaaaatatcaagcaacggataatggtaattgttttatataaaggtttaaatatatttttagtcttttaatttaaaattattattattttttagtccttaaaaacaaatatgcaaattttagtaatctaaaattttaaaatctagttttagtcttgttttgttaactctataacagaggttgtctgtgtggaaaatgatgtgcaattttgtggcgatttctttagtgtgaaaattttgttttaaatttaaatcaaacaaaatgtctcgcaaggcaacaataacgttgttgctgctaacaatcttcgtgtggcaaaatcaacagtggagaaaacgactatcaacaatgttagagaagagttgacgaaggaaaatggggaaaataggacaaacccgaacaaaaaaaccacccttgacttg

SEQ ID NO: 218 - DNA, 5760 bp, Artificial Sequence
  Synthetic polynucleotide
ataaatggtagaaatctgtgggttcaaatgttcaattgctggggatcttcgtgatcatgatgattcatacacaatctctagaaacacgtacgcaaatattaattaatcaatttcctttttatagtctcctcacaattcacatgaaacttcatactctattatccgattccatttccatcgtatctttgaatttgacatttgtttgcccaacatgtaattaactttcccttctcatcttaaagatgtaacatgatatatattataacttgtaattaacccaatatttttaactctctatttttacactcatctgacatgtatttttatttttcatttttttttcttatcacatcacctcttacgtgtacaatttttctctttttcttatttctgtcttccataatagtaattaatattcatcggtccgatatgtatacagcccaaaaaagtgtgtaaaatcatttttgtatttctaaccctctctttctcatgcaagctagcttcttctttctatttatagcccttctcccttcacccaccaacacaccacaactccaaactttttcctcttgttctcttcttcttcaacacaactagtcataatccagctcatctctctctccctctctctttgttctctctttctctttctccaaaatggctctaaactacccttttttaacctacttcatactactgctagtaaccatagatattcactgtgggaaaaactgagcaatggaaagctccgattctaccagagcttgacattgataacatatcccacaaactccatgatgaccctgaaaccattcaaatggcttcaagggactatggccatttaacgcatgaattcccattagctgtgtttcgtccatcttctatagatgacatagtcaccttgataaaatcttcgtacaatagctttgccccttttgacatagctgcgaggggccaaggccactccactcatggacaagccatggctcgtgatgggattgtggtggacatggccagcctaagaaaacaaagaaatggggttgcgattagtgtctctaaggaccctttgatgggtcactatgctgatgttggaggggaacaactctggattgatgtgctacatgccacacttgaatatggacttgcaccagtttcttggactgattatttgtacttgaccgtgggagggacactttctaatgctggaatcagtggccagagcttccgttatggacctcaaatcagcaacgttcatgaaatggatgtcatcactggtatggagttagttgttttttttaatcaataaatgttaatattattagcttgttagttttttttgaaaaaattgaattaactttcgtttcctcttttctttctttttttaaccacacaattaatctaataactactggtattaagttagtttattttccatttttcatatataagttaggatttctaattaaaattgacatttcgtaccaccactacaaaaaaataatgtatcagtggcacaaaaaaatatattggcatcacttgtttttttagtcattaatattttgtagcatcacaaaaaatatggtgacaagttttctaaaaattacaaattaactgattcgtcagtgatgttaatgattttttagtgcgtcttggcaactaatgttttcatcttatataaaattagaaacaatagcggcaacagcacctgacattgtgtttgtgttttgcgtgtttctatcgcctaatttttgttgagaacgtgttcgtgaaacttggaaaaagagaaaattgaaattttcttgagatatctaccacttaagaaaaacaaatggctgtttccgttttgtctcttatgacatgacatggtacgtcatagatgaagttctgctaaatatatttgatatgatttcttgaacacgttttatatattcccacttcccagttagtgtggttgttgaatctaattaaaacaggaatagtctttgtctacaatatgggtgagcgatgcaaactttccaagggtttagaagttagaactatataggtccacggtcataattttatattcttgattaactttatgttggttaagtcgttcatatttggtcaattcattcatatgagaaaatactgaaatacaaacatggaaaaatgttaattactcttataattggcgcatgcatgcatctaaattatatgattttaataaatagtttttgtcatctacttgatttcaggaaaaggagagttcgtaacatgctcttcacagaagaacttggagttattccacgcggttcttggaggcttgggacaatttggagttatagcaagggcgagaattgctcttgagccagcacccaaaagggtacgtttatagagaattgactagaattttgtcttgtagcttttcctccaccaattcatatagtgacacctaatcgaattgtcatttttttttacggtgaattgtcattttgtaaatctaccaagtggtagttggcacccatatatgtatgaactatagtaccatacatttcattttatgttggtgtgttagtcatccatgatgaacacatacacaaatgaaaataggacgagttatacgtacgtaagggtttgaatcactgaatgtggatttttgaagttgaaagcatattaatcttggtttgaaaaagaaaaaaaaaatcggaagtccctcttgaagttatcatgactcttatattaagccaatagaattagaaaaactataattatgaatgatcatgttaattctttcagtgacttaaaatcttatctacaaaaagtacccttttgaaaaagaccttcacttaagtccatgcatacagtactaatcttacatacttgagagttgagacttgaagcatgaggagatttgaagtctggagaaacaagccaccacatattaattactaccgtattcttatctttatttatccttccaattttgatgggactggttgcacatacattcatacatactaacatacataaatacgtctctctctcatgtatttcattttattatattctatttcgttagtaagtttactagtataagacattattaatggtgaatttttgttggcatgcaggttaagtgggtcagactactttatagtgacttttctgcttttaccaaagaccaggaacgattaatctcaatcaatggaaggaaacaaaagaacgcattggattttctggaagggatgctgctaatgaaccaaggccccataaataattggagatcctctttcttccctctatctgaccatcccagaatagcttctttaataactgaacatagcatcctctactgtcttgaagtggctaaatattatgacgaacaaaccgagttaaatgtggacaaggtaacctcgtctagtcatatctattatatatagttagatcttgtcacatttctttgtttaaaaaataaaataaaaggcacaatcccaaaaagtcaaaagcaaatgcctagatattgtgtgttttcttggatattaattattacaccttaataacccataataatttttttatttttctttgtctctgtaggaaattgaagttttgctccaaggactagcctatatccctggatttaattatgagaaaaatgtctcgtacgttgagttcttgaatagggtccgaagtggagagttgaaacttcagtcacaaggactgtgggaagttcctcacccgtggcttaatttgtttataccaaaatctcaaatcttggattttaattcaggagtattcaaagatatagttcttaaaagaaacatctcctctggaccagtcttggtttatcccatgaatagaaacaagtaagccttgaatgcatgaatcacaatctagtgtcattataattcaggagtgtgtgatgcaatcttttaattttctgaccattcaactcaatatcaattttatttcttttttcaattaaaatgcaaaagagaataataattaataatatgaaatttaattccaggtgggacgataggatgtcagcatctataccagacgaggatgttttctacacagttgggtttttgcactcaagtgggtttgatacttggaaggcatatgatgctcaaaacagagaaattttggagttctgtagagatgctggcatcatggtcaagcaatatcttcccaaccacagcacacaagaagattggacaaaccattttggtgctaaatggatgaaattcttagaaagaaaacatcagtttgatccaagaatgattctatcacctgggcaaaaaatcttccacaaaaaattacagccagtgttttaaatattttccctaataaaaaaagtaaaaatgttttgtggtgggactacctcaattagatggctagctagggacaggtgtacatacagtgtgaccaagaccaagatggcttttgtatgctaaagtttgcattgctagctagagaaattaataaggtggggcattaaaggctgcatgagtacttttggcacctattatgctacatattaccttagatacgttaggttgacaaagtcgtactggtaggtacaagaagcacagttgtctctcacactgtctgtcacccaacttgctatatagtgtgtggagaaattcggatcatattgaagatgctgtgagttatagtcctccaatattaaatgtttaacgattctgtctttctcttatataattttgttttgcattatattactttcgcactggtgcaaacatatatatcaatgattataattaatttatacaatgacgagtataattgtacccaagttgcatgccataatatttgtcaaaaacaaaaagttgtatgccataatcaatccaggttgctagataataagatagatatgaatatgataacataaaatgctattaaagcaacaaataaacaataacacatagtccttatagggttcataattgatcgatgaacctagctagacgttgattttaggttaatttccagcgaggataaaatttattatataaagaaataactaaccaacacaaaataataaaaaattaaaaaaaaacgaagaaacttattttagagatataatttgttttagtatttgattgtaatttgagagattagctaggctctcaccaagtgagatctagagtatattcttaagaaaatatttataataaagaacccttaaacattttgcaaaacaaagggtggaattaatattaacaacaataattataatatcttgaaaattttatgaaaataatatatatatatatatatatatagagagagagagagagagagagagaaaattctcacaaacaatttttatctgttatttcaaattggtgtatgactccttagtccttagttcatttgtttgcacccagtcctgtcttaggtagttgattttatagttaggtaaattaatttctcgcactcttcgcttgattgtcatttatgggttgaactgttgaagtgattttatattttttaataaatttcacctgcaaaaaaactcaccattagcatacgccccccccccccccccccccccctctcccaaaaaaaaaaaaaaaacgaaagaagattaattagaaagaataaggtcgtgaaatgatgttacaaataaggcatatcagaatcagacgcaagggaagaataaaaacgttacaacaattcgcgcacaatgcaccccaaaaaaaaaatgacaggcacacataccttaaggaagaagaatcaacgctttca

SEQ ID NO: 219 - DNA, 5757 bp, Artificial Sequence
  Synthetic polynucleotide
ataaatggtagaaatctgtgggttcaaatgttcaattgctggggatcttcgtgatcatgatgattcatacacaatctctagaaacacgtacgcaaatattaattaatcaatttcctttttatagtctcctcacaattcacatgaaacttcatactctattatccgattccatttccatcgtatctttgaatttgacatttgtttgcccaacatgtaattaactttcccttctcatcttaaagatgtaacatgatatatattataacttgtaattaacccaatatttttaactctctatttttacactcatctgacatgtatttttatttttcatttttttttcttatcacatcacctcttacgtgtacaatttttctctttttcttatttctgtcttccataatagtaattaatattcatcggtccgatatgtatacagcccaaaaaagtgtgtaaaatcatttttgtatttctaaccctctctttctcatgcaagctagcttcttctttctatttatagcccttctcccttcacccaccaacacaccacaactccaaactttttcctcttgttctcttcttcttcaacacaactagtcataatccagctcatctctctctccctctctctttgttctctctttctctttctccaaaatggctctaaactacccttttttaacctacttcatactactgctagtaactgatattcactgtgggaaaaactgagcaatggaaagctccgattctaccagagcttgacattgataacatatcccacaaactccatgatgaccctgaaaccattcaaatggcttcaagggactatggccatttaacgcatgaattcccattagctgtgtttcgtccatcttctatagatgacatagtcaccttgataaaatcttcgtacaatagctttgccccttttgacatagctgcgaggggccaaggccactccactcatggacaagccatggctcgtgatgggattgtggtggacatggccagcctaagaaaacaaagaaatggggttgcgattagtgtctctaaggaccctttgatgggtcactatgctgatgttggaggggaacaactctggattgatgtgctacatgccacacttgaatatggacttgcaccagtttcttggactgattatttgtacttgaccgtgggagggacactttctaatgctggaatcagtggccagagcttccgttatggacctcaaatcagcaacgttcatgaaatggatgtcatcactggtatggagttagttgttttttttaatcaataaatgttaatattattagcttgttagttttttttgaaaaaattgaattaactttcgtttcctcttttctttctttttttaaccacacaattaatctaataactactggtattaagttagtttattttccatttttcatatataagttaggatttctaattaaaattgacatttcgtaccaccactacaaaaaaataatgtatcagtggcacaaaaaaatatattggcatcacttgtttttttagtcattaatattttgtagcatcacaaaaaatatggtgacaagttttctaaaaattacaaattaactgattcgtcagtgatgttaatgattttttagtgcgtcttggcaactaatgttttcatcttatataaaattagaaacaatagcggcaacagcacctgacattgtgtttgtgttttgcgtgtttctatcgcctaatttttgttgagaacgtgttcgtgaaacttggaaaaagagaaaattgaaattttcttgagatatctaccacttaagaaaaacaaatggctgtttccgttttgtctcttatgacatgacatggtacgtcatagatgaagttctgctaaatatatttgatatgatttcttgaacacgttttatatattcccacttcccagttagtgtggttgttgaatctaattaaaacaggaatagtctttgtctacaatatgggtgagcgatgcaaactttccaagggtttagaagttagaactatataggtccacggtcataattttatattcttgattaactttatgttggttaagtcgttcatatttggtcaattcattcatatgagaaaatactgaaatacaaacatggaaaaatgttaattactcttataattggcgcatgcatgcatctaaattatatgattttaataaatagtttttgtcatctacttgatttcaggaaaaggagagttcgtaacatgctcttcacagaagaacttggagttattccacgcggttcttggaggcttgggacaatttggagttatagcaagggcgagaattgctcttgagccagcacccaaaagggtacgtttatagagaattgactagaattttgtcttgtagcttttcctccaccaattcatatagtgacacctaatcgaattgtcatttttttttacggtgaattgtcattttgtaaatctaccaagtggtagttggcacccatatatgtatgaactatagtaccatacatttcattttatgttggtgtgttagtcatccatgatgaacacatacacaaatgaaaataggacgagttatacgtacgtaagggtttgaatcactgaatgtggatttttgaagttgaaagcatattaatcttggtttgaaaaagaaaaaaaaaatcggaagtccctcttgaagttatcatgactcttatattaagccaatagaattagaaaaactataattatgaatgatcatgttaattctttcagtgacttaaaatcttatctacaaaaagtacccttttgaaaaagaccttcacttaagtccatgcatacagtactaatcttacatacttgagagttgagacttgaagcatgaggagatttgaagtctggagaaacaagccaccacatattaattactaccgtattcttatctttatttatccttccaattttgatgggactggttgcacatacattcatacatactaacatacataaatacgtctctctctcatgtatttcattttattatattctatttcgttagtaagtttactagtataagacattattaatggtgaatttttgttggcatgcaggttaagtgggtcagactactttatagtgacttttctgcttttaccaaagaccaggaacgattaatctcaatcaatggaaggaaacaaaagaacgcattggattttctggaagggatgctgctaatgaaccaaggccccataaataattggagatcctctttcttccctctatctgaccatcccagaatagcttctttaataactgaacatagcatcctctactgtcttgaagtggctaaatattatgacgaacaaaccgagttaaatgtggacaaggtaacctcgtctagtcatatctattatatatagttagatcttgtcacatttctttgtttaaaaaataaaataaaaggcacaatcccaaaaagtcaaaagcaaatgcctagatattgtgtgttttcttggatattaattattacaccttaataacccataataatttttttatttttctttgtctctgtaggaaattgaagttttgctccaaggactagcctatatccctggatttaattatgagaaaaatgtctcgtacgttgagttcttgaatagggtccgaagtggagagttgaaacttcagtcacaaggactgtgggaagttcctcacccgtggcttaatttgtttataccaaaatctcaaatcttggattttaattcaggagtattcaaagatatagttcttaaaagaaacatctcctctggaccagtcttggtttatcccatgaatagaaacaagtaagccttgaatgcatgaatcacaatctagtgtcattataattcaggagtgtgtgatgcaatcttttaattttctgaccattcaactcaatatcaattttatttcttttttcaattaaaatgcaaaagagaataataattaataatatgaaatttaattccaggtgggacgataggatgtcagcatctataccagacgaggatgttttctacacagttgggtttttgcactcaagtgggtttgatacttggaaggcatatgatgctcaaaacagagaaattttggagttctgtagagatgctggcatcatggtcaagcaatatcttcccaaccacagcacacaagaagattggacaaaccattttggtgctaaatggatgaaattcttagaaagaaaacatcagtttgatccaagaatgattctatcacctgggcaaaaaatcttccacaaaaaattacagccagtgttttaaatattttccctaataaaaaaagtaaaaatgttttgtggtgggactacctcaattagatggctagctagggacaggtgtacatacagtgtgaccaagaccaagatggcttttgtatgctaaagtttgcattgctagctagagaaattaataaggtggggcattaaaggctgcatgagtacttttggcacctattatgctacatattaccttagatacgttaggttgacaaagtcgtactggtaggtacaagaagcacagttgtctctcacactgtctgtcacccaacttgctatatagtgtgtggagaaattcggatcatattgaagatgctgtgagttatagtcctccaatattaaatgtttaacgattctgtctttctcttatataattttgttttgcattatattactttcgcactggtgcaaacatatatatcaatgattataattaatttatacaatgacgagtataattgtacccaagttgcatgccataatatttgtcaaaaacaaaaagttgtatgccataatcaatccaggttgctagataataagatagatatgaatatgataacataaaatgctattaaagcaacaaataaacaataacacatagtccttatagggttcataattgatcgatgaacctagctagacgttgattttaggttaatttccagcgaggataaaatttattatataaagaaataactaaccaacacaaaataataaaaaattaaaaaaaaacgaagaaacttattttagagatataatttgttttagtatttgattgtaatttgagagattagctaggctctcaccaagtgagatctagagtatattcttaagaaaatatttataataaagaacccttaaacattttgcaaaacaaagggtggaattaatattaacaacaataattataatatcttgaaaattttatgaaaataatatatatatatatatatatatagagagagagagagagagagagagaaaattctcacaaacaatttttatctgttatttcaaattggtgtatgactccttagtccttagttcatttgtttgcacccagtcctgtcttaggtagttgattttatagttaggtaaattaatttctcgcactcttcgcttgattgtcatttatgggttgaactgttgaagtgattttatattttttaataaatttcacctgcaaaaaaactcaccattagcatacgccccccccccccccccccccccctctcccaaaaaaaaaaaaaaaacgaaagaagattaattagaaagaataaggtcgtgaaatgatgttacaaataaggcatatcagaatcagacgcaagggaagaataaaaacgttacaacaattcgcgcacaatgcaccccaaaaaaaaaatgacaggcacacataccttaaggaagaagaatcaacgctttca

SEQ ID NO: 220 - DNA, 7386 bp, Artificial Sequence
  Synthetic polynucleotide
ttaaatcggttcaaaattgttgaatcgatccaaaactagtaaatacagtaggttaattgatttcacttgaaatttaaaaaaaaaaaattaaaatgacgtcattttagtttttttttaaattattataacttatatgacatttttaagtgaagtttactttttattattattaatttatgcatactaggtttctgaaatattatattaaaatattatatatatatatatatatatatatatatatatatatatatatatatatatatatatatatatattattaaaatcaattccacttcgattgagctattaacttttgaaccaatatcttccccagttcaatgaccatccaagtctgaaaacattggttaccatcaacgttacccttccgtgaattggaaaagttaatgcaatataggttgatccaaggataagtcctatggtcccagaaagaaaatcttgagagatccttttgataattacccgagtttttactctctccttttaattcacgaaattggaaacttcaattgctaatataaaaagaattttgttagccaatatcatcagggtattgtcaaagaattacaagaaaaaaaaattataagataacataaaaaaataaaaaacaacataattttatatattttaataaaaaattcttttaatttttttttatcaatattctatagttactggcatttgacatgtaaaaatgtaaacatatgaattgataaaatttgaccaatgtttgaccctgagataggaatccaacggccccagttcaattgcaatcttttatttttactacgtgaaggcccaacaatggagaaccttgtggattttattgctgagaatctgtggttacgatgatgacacaccaacacaatcacagaaagcaagtaccgtttggaaggcctaacacttcattaattgcttcattaaatttattttactttctagctgctcaatttaattgctttacacaaatacttcatgacgtttcagaaggagggccaaatacaatctctacaatggttccatcgtatctttgaatttgacatttagcatccctccctttgcacaatgtacaatttgcattttgaatatttttttctcaccttcatatcgtgggactacttctataaccatcctggtgaaaataaataaagcgagggaattacgtaattaaacatatttaaatttctctctcctctgtttaattaatttatcaaaaacaaatatgtgtgcgagtatttaaaaatgtgtaaagtattattattttttaatttttcttttttccttctcatcaatgataaatatactttttaatataaaaatcaaacaataactataaaaaaaacatcttcacttcaattcaacattaaataaaaaataatccctgctttgttattttttacccaccaattatcatatttgttatttattatttttttatgttcttgctataaaggaaatcactatttgactcacacaaaactataaaggaatcaaataatcaattattatttaaaaactctattaaaataacaattacaacaaaatcccttatttttttcttccttatcattattaaaccttcccattctctctttctatctctacatgtttttctcaaattaaatattttctatatcctcctttatcatgcaaattaaagtcctcttccattctatatatagccgctacctcctccacctcctttccccactacaacacacaaacaccaacaaccaaatcaatccatccaccctagaaacaacaaagcactctctcttctctcattctattatcttctctcatcctcttattctctccaaaccaacaaaaaaaaaatggttgctgagaactacccttctcccacatacttcatcctataacacgtttgatctccacagtgggcaaaacctcccaatggacgaaggccctgtcgctgcctccggaactcgcctccgtctccctcgacgacaccatcttctgcaagctccgtgacgacccagaggccctccagggaagggcctccagggactacgggaacctcgtccgcgaggttcccttggcagtcttccacccagcctcagcgagcgacatcgcgaggctgatcaagctgtcgtacaacggctctgtccccttcaagattgcggcgagggggcaagggcactcgacaaggggccaggcgatggcacgtgagggggtggtggtggacatggcggggttcagagagagagggaatggagtggggataagggttgtgagtagtgtggaccctaataataagaatggttactactattatgcggatgttggaggggaacagttgtggatcgatgtgctacacgccacgctcgagcatggacttgcacctatgtcctggactgattacttgtacttgacgctgggagggactctctccaatgctggcatcagtggccagacattccgctatggtcctcaaatcaccactgtccgggaaatggacgtaatcaccggtaagaaaactttccattcaaccagttaacttacatgtttttagttttttagcttccaatatccaatagtttataacttgtaagcttcaattttatgttaatttataagctagttttaccctacttttgaaaattcaaggattttggtactacaataactcccttgtcaaactcgttcaattgttggcttagtatcaagtagactcttggatttttaggtgtactttaacaaccatgttaatttaattgatcagggttttaatattatggaaattggccattggacaacttggaatggaaggaaagcgggagatggaaagggaaaagaaattaattagaataattgttaatattagttgcgtgaaaaaaattaaatttgctgaattaaattatggttcatcacgactctatttgtggcaacaccaacgtgccgttttcagaacttcattgcaacagcggttatagtggcgtttattcaattcatattttaatgcatcagactgtgattgcgattgaaattttatgaaatcttgttttataaacttgttcttttgattaggaaacttgattctattttatatatatttaatgtaacgccgaattaatggttgataaacgagtctttgtctaaaattttggcgaatgttagcaagcgttttccacgtggtcccgtacgtgtttgaaaaattcttaatcatggaatcagttcacacgggcagtcatagactcatagactccaattcttgattaattgttttcttattaatattggtccatggtcttattttggtcaattctttttattaaaaataaacgggctgctgaattttaatttactcaagtgtttgttaatgaatatgtgtgcatgcatgcaattatatatatatatatatattactattatttatttgtgttttaatcaaattttggtttggttcaggaaagggagaatttgtgacttgctctcagcagacgaattcggagttgtttcacgcggttcttggaggcttaggacaatttggaattataacaagggcaagaattgctcttgcgccagctccgaagagggtacgtttaaaatcttcggaattgactaggacttgtcttgttgcttcttcctccaacatctctcatatagtaacgcaaatttctaaatatgttacattattaattcaaccaccaagctttgcggaagcatcaaatgtcgttgtcctgaaagcttcatgtcatcatttttcttggcacccatatacacacacatacgtttcacattgtgtcagtgcatattagtcatccatgaaagacacatgtacaaatgaaaacgagaggagttatattaaaatgtgtgttggaaaaatatatatcatattttcataagtcttaattttgaaattaatatacagtaaccctttgagaccttagcaattaagccaataaaaaggctcgtattaaccccaaccaacaactattagaaaatactaacaagtataggtgtatacataaatgattcatttgaattttagtaccttaattatttaactttatccttctatttgacgggactcgttgcataagccatacatacataatcatgcgttcattattgtttttcattatgagttaatgagttgattgtatgaactaatggtgaatttttgttggcaggttaaatgggtgagacttttgtacaatgacttttctgcttttaccaaagaccaggaacaactaatatctatcactggaaggaaacaaaatgtttcactggattatttggaaggattgctgctaatgcaccaaggacccataaataattggagatcttctttcttccctttagccgaccatgcccgaataatttcgctagtaactaaacacagcgtcctctattgcctagaagttgccaaatattatgatggccaaaatgaaaacaatgtggacaaggtaccatctccattcatgtgcatttgccttgatgatgtttcttctattttttcttttaatgttttgatctcaccttatataataaccctttatcacactcaatcttgttatatttttaagagtttaatgataatattatgattttgttgtgaaaaaagagagtttaattgttattatataatcacaaattatcattaatatgacttttaaaataattaataatataaaaattaataaatttatcgtatttaatgagttataattaaatgatcatataaaattattttatattattaacatatagtttttttttctatttttaatatttgttttactataagttgttatattttcaatcttttttctagtataagttttaataatcaatattgtaagtaatattctcatttttcatgttgtgtaggaactccaagttttactacaaggattgagctatatccctggattttactatgaaaaagatgtctcatattttgagttcttgaatagagtccgaagtggagagttgaagctacagtcacaaggactatgggatgttcctcacccgtggcttaatttgtttataccgaaatctcaaatcatggaatttgactcgggcgtgttcaagaatatcatccttaaacgaaacatcaccacaggacctgtcttggtttaccccatgaatagaaacaagtaattgagcttaactaactaatctcaacttatgttgttatcattaggaaaaatgttaattggtacgaaaactatatataccactattttcatttaaattcatgaaagtgaaatttctctttcctaaaacaaattctttctcttaaaatgaatttttgtttttctcaatctccatcaattacttatttccttttttgaatgtttgaaaagtcattcacaacattttcttcataaaagggttattcgtaccaatttaaatagaattgccgttattatcagatgtacaattcttctcttcactcacttcttttccattaaaattgtaaaaaaaaaataaaaaaatcaggtgggacaataggatgtcagcatcaatacccgatgaggatatcttctacacagttggatttttgcattcaagtgggtttgataattggaaggcctatgatgctcaaaataaagaaattctacaattttgtaacgttgctgggatcaaggttaagcaatatcttccccactatcgcacacaagaagattgggcaaaccattttggccctaaatggaggacttttgtagaaagaaaacaccagtttgatccaagaatgattctatcacctggacaaagaatctttaacaattaaaatagctttaaaaatatatattcccccccccccccccccccccaaaaaaaaaaaaattatataatatggtgggactacccaagttagctagctggctgatcacaagtgtgcacataggacccagaattcagatgatagcctttgtacttgtttttgttaagagggtggggttaaaagctgcatgactttggcatatatgtagatcaggttacacatactttagatacgttaggttgacaaaatcatgtgtgaaataagatgcacacagctagctgtgtacctttctttctctctgtccctcaatttgtctatcactaaaaagatttctatatagtttagaacctagtgaagagaaagaaaaaaccattatattgaggatttaattttatcacgttctaatcctatacattaatattcttaaatgtgcaatgagtgtgctcggtgccttaatgattctttatctttgttaattgttatattgtagggttttgtttttgccttcctaattttgtaacaggggcacccctagcaataattgagatcctaggttaactaaggaacagcattattgtgtctaaattgagattcctagctgtatgccataataataaatcatcgtaggttgctagatagatgtgatagcgccaaatgccttccaatactataatctccattgcaagatccttcgttgtgattgtgtagaaaagattacgctgctttacaagagaatactccaagaaagcaagtgattgctccttaatataaagaatcatgcaataaacaaatggtgtcgtaatccataaagtgtatttaatatttgatgaaagagtagtgtagacatcaaacaaaataaagtttgatgcaattcgaattatagatacttgattaatctctaaattatgttgagacaatcatatttgaatttgataagactattatgaacgataaaaaatattataaataataaaaaaatttcatcaaacatttaatacaattatataccttactcaaatttgaaaacctgtacatataggaaaaaaacctttactaaaagaggttaaactcaccatacggatttttatatgtcgaagggatctttaattgtccatcggaaaacatcctaattcataaaaaaggaaagaaagtttagacatgaataattacggaccaatgaatgcaacctacgtctctcaattttaaggagaatttaggaatattatagtatatcactgaaagtacacacaagtggcaatgatgaatattttaatttaaagttttaattggattcgaaattaatcccttcttttttccagaaaaaataataatcatcgagtaatcaagacaatttcccaagtagacaacaagaatacaaaagagaatacgtgacttcgtttcaccatagaaaagaaggaatgcaataacgatgataataattataaaatgaaattgacaaaatatctaaatgcctgtagatatttctacagcgaatgataagtgtttttccattaaaaataagtttcttttgttaagaatttctaacatttttagttccaaaatataggaatgaagccaataagtaagtaagaatttctaacgtctgaaag

SEQ ID NO: 221 - DNA, 5916 bp, Artificial Sequence
  Synthetic polynucleotide
atttagcatccctccctttgcacaatgtacaatttgggttttgaataatttttgtcacaccttcatttcgtgggactacttctctaatctatacccatcctggtgaaaaataaagggagcgagttacttacttaattaaacatacttaagtttctctctgactctctctcctctttttaattaatttatcataaacaaatatgtgtgcgagtattaaacccgtgcaaaatattagtattattgtttaattttttttccttctcatcaatcataaatatactttttaatacaaaataaaaaatagttaactcagaagatttcttcacttaatcacttcgattcaatattaaaaatcaatccacgctttgttgttttttttcccatgacttatcacgtacatttattatttattatttttctgatgttcttactataaagggaatcactatttgtcacacacaaaactataaagggaatcaaatgatcaattcttatttaaaaactctattaattaaaattacaattacaacaaaaccctaattttatcctccttataattaaacctccacattctctctctctctatcaatacatgtgtttctcaaattaaatattttccatatcctccttttatcatgcaaagtcctcttccattctatatatagcccctacctcctccacctcctttccccactacaacacacaccaacaatcaaatcaatccatccaacctagacatctctcatcttctccaaattaacaaaaatggtagctgggaaatacccttcccccacatacttcatcctcctgctcataaccataacacgtttgatctccacagtgggcaagacctcccaatggatgaagccctaacgccgcctccggaactcgcctcggtctccctcgatgacaccatcttcagcaagctccgcaacgacccagaggccctccaggggagggcctccagggactacgggaacctcgtccgcgaggttccctcggcggtcttccacccgacctcgtcgagcgacatcgcgaggctgatcaagctgtcgtacaacggttctgtccccttcaagatagcggcgagggggcaagggcactcgacgaggggccaggcgatggtacgtgatggggtggtggtggacatggccgggttcagagagagagggaatggagagggaataagggttgtgatgagtgttgttgtggaccctaataataagaatggttatggttactattatgctgatgttggaggggaacagttgtggatcgatgtgctaaacgccacgcttgagcatggacttgcacctatgtcctggactgattacttgtacttgacggtgggaggaactctctccaatgctggcatcagtggccagacattccgctatggtcctcaaatcaccactgtccgccaaatggacgtcatcactggtaagacaactttcaatttattcagttaattttatcatataattttaccaaatacttataaaccatatcagaaacttttaatttaatcaactaactcacaattagtttaatcatatacttttaatttaatccactaacttataaatttgtaacttttcagcttggaggtttgtaggttataagtctcaactttccactaacttataagttagttttagttttattgtatgtggtacttttgaaaattcaaggattttggtactataataactcgttcaactgttggcttagtatcaaaactcttggattttcaagtgtacttcaacaaccatcttaatttaattgatcagggttttaatattgtgaaaattggtcattggacaacttggaaagtgacacagcttggaaaagaaggaaagagggagatgggaagggaaaagaaagaaaataacttttaaaattagttgcgtgaaaaaattaaggttgctgaattaaattatggttcaccacgactctaattgtggcaacccaacgtgccgtggttgtggatattttcagaactttattgcaacttcggttatagtggcgtttgttcaattcattttttaatgtatcagactgtgattgcgattgaaattttataaaatctttttttttttaaacttgttcttttgattaggattaggaatttcagaaacttgattctatttcatatacttttttttaatgtaataccgaattagtggttgataaacgagtctttgtctacaaatttggtgaatgttagcaaccgctttccatctggtcccatgcttgaaaattttcttaaccatggaaattagttcacacggacagtcatagccttcaattcttgattaattgtttccttttctaaaatatggtgatactattatattattggtccaaggtcttgttttggtcaaatttttttattagaaataaacgggctgctgaattttaatttactcaagtgtttcttaaagaatatgtatgcatgcatgcaattatatattattattattatcattactgttatgtttaatcaagtttaatttggtttggttcaggaaagggagaatttgtgacttgctctcagcagacgaattcggagttgttccacgcggttctgggggcttaggacaatttggaattataacaagggcaagaatcgctcttgccccagctcccaagagggtacgtttaaaatcttcaagaattgactaggactttgtcttgttgcttcttcctccaacatctctcacatagtaacgccaatttctgcatatgttacattattaattcaaccatcaagctttagggaagcatcaaatgtccttgtcctaaatgctttatgtcatcatttttcttggcaccctttcgtttcacattgtgttagtgcatattagtcatccatgaaagacacatgaaaataaaatttgttggaaaaatataaatcatattttcataagtcttttgaaatatacagtaaccttagagaccttaagcaattaagccaataaaaagggtcgtattatcaaaccccaactaacaactattagaaaatactaacaagtataggtgcatacataaatatgtttccactagaaagtatataaagttggtgagatgattcattttgaattttagtaccttaattatttaactttatccttctatttgatgggactcatcgcataagccatacatatatacataatcatgcgttcattattgtttttcattatgagttaatgagttgattgtatgaactaatggtgaatttctcattggcaggttaaatgggtgagacttttgtacaatgacttttctgctttcaccaaagaccaggaacaactaatctcaatcactagaaggaaacaaaatattgcactggattatttggaaggattgctgctaatgcaccaaggacccataaataattggagatcttctttcttccctttagccgaccatgcccgaataatttcgctagtaactaaacacagcgtcctctattgcctagaagttgccaaatattatgatggccaaaatgaaaacaatgtggacaaggtaccgtctccattcatgtgcatttgccttcatgatgtgtcttttatttcttttcttttaattttttgtctcaccttatataataaccctttgtcacactcaatattattatatttttaaagagtttaatggttatacactatttttactttatttaattataaattatcattgatatattttttaagataattatcataaaagttaataaatttatcagttataattgaatgattgtataaaattatttaatttatattgcataatttattttctatttgtaatctttttttactataagttgttatattgtaagtaattaatattctcattttcatgattgtgtaggaactcaaagttttactacaaggactgagctatatccctggattttactatgaaaaagatgtctcgtatgttgagttcttgaatagagttcgaagtggagagttgaagctacaatcacaaggactatgggatgttcctcacccatggcttaatttgtttataccgaaatctcaaatcatggaatttgactcgggcgtgttcaagaatatcatccttaaacgaaacattaccacaggacccgtcttggtttaccccatgaatagaaacaagtaattgagcttaactaactaatctcaatttgtattgttatcattaggaaaaatgttaattggtacgaaaactatatactacactattttcattaaaattcatgaaagtgaaatttctctttcctaaaataacttctttctcttaaaatgaatttttgtttttctcaatctccatcaattacttatttccttttttgaacgtttgaaaagtcattcataacttttttttcataaaaaggtcatttcgtaccaattaaatagcattgcctttattatcatatgtacacaattcttctcttcactcacttctctctttttttttcccattaaaattgtaaaacaaataatcaggtgggacaataggatgtcagcatcaatacccgacgaggatatcttctacacagttggatttttgcattcaagtgggtttgataattggaaggcctatgatgctcaaaataaagaaattctacaattttgtaacgattctgggatcaaggttaagcaatatcttccccactaccgcacacaagaagattggacaaaccattttggccctaaatggaggacttttgtagaaagaaaacaccagtttgatccaaaaatgattctatcacctggacaaagaatctttaacaattaaactagctttaaaaaatatatataatatggtgggactacccaagttagctagctggctgatctcaagtgtacacataggacccagaattcagatgatagcctttgtacttgtttttgttaagagggtggggttaaaagctgcatgactttggcatatatgtagatcaggttacacatactttagatacgttaggttgacaaaatcatgtgtgaaagatgcacacagctagctgtgtacctttctttctctctctctctttctttctctctgtccctcaatttgtctatcactaaaaagattactatagtttagaacctagtgaagatggaaaaaaatcattatatagaggatttaattttatcacacgttctaatcatatacattaatattcttaaatgtgcaatgagtgtgttcggtgccttaatgattctttatctttgttaattgttagtatattatagggttttgtttttcccttcctaattttgtaacggccatccctactagcaataattgagatcctaggttaactaaggaagagcattattgtgtccaaattgagagtcctagctgtatgccataataataaatcatcgtaagttgctagatagatgtgataacgccaaatgccttcaaatactattattaatctccatcgcgagatccttcgttgtgattatgtagaaaagattacgctgcttttacaagagaatactccaagaaagcaagtgattgctccttaatataagaatcatacaataaacaaatggtgttgtagtccataaagtgtatttaatatttgatgaaagagtgtgtagacatcaaagtgataaaactaataaatttaagtttgatgcaattcgaagtcgtagatacttaattaatctctaaatcatattagttttaaaccatacagattttaatatgttgaatggattaatctttaattgtgcattggaaaatattataattcataaaaaaagaaataaagtttagacatgaataattacggactaatgaatgcaacctatatatactacgtctctcaattttgcggagaatttaggaatattatagtatttcactgaaaggacacacaagtggcaatgatgaatattttaattt

SEQ ID NO: 222 - DNA, 5643 bp, Artificial Sequence
  Synthetic polynucleotide
ataaatggtagaaatctgtgggttcaaatgttcaattgctggggatcttcgtgatcatgatgattcatacacaatctctagaaacacgtacgcaaatattaattaatcaatttcctttttatagtctcctcacaattcacatgaaacttcatactctattatccgattccatttccatcgtatctttgaatttgacatttgtttgcccaacatgtaattaactttcccttctcatcttaaagatgtaacatgatatatattataacttgtaattaacccaatatttttaactctctatttttacactcatctgacatgtatttttatttttcatttttttttcttatcacatcacctcttacgtgtacaatttttctctttttcttatttctgtcttccataatagtaattaatattcatcggtccgatatgtatacagcccaaaaaagtgtgtaaaatcatttttgtatttctaaccctctctttctcatgcaagctagcttcttctttctatttatagcccttctcccttcacccaccaacacaccacaactccaaactttttcctcttgttctcttcttcttcaacacaactagtcataatccagctcatctctctctccctctctctttgttctctctttctctttctccaaaatggctctaaactacccttttttaacctacttcatactactgctaggcttcaagggactatggccatttaacgcatgaattcccattagctgtgtttcgtccatcttctatagatgacatagtcaccttgataaaatcttcgtacaatagctttgccccttttgacatagctgcgaggggccaaggccactccactcatggacaagccatggctcgtgatgggattgtggtggacatggccagcctaagaaaacaaagaaatggggttgcgattagtgtctctaaggaccctttgatgggtcactatgctgatgttggaggggaacaactctggattgatgtgctacatgccacacttgaatatggacttgcaccagtttcttggactgattatttgtacttgaccgtgggagggacactttctaatgctggaatcagtggccagagcttccgttatggacctcaaatcagcaacgttcatgaaatggatgtcatcactggtatggagttagttgttttttttaatcaataaatgttaatattattagcttgttagttttttttgaaaaaattgaattaactttcgtttcctcttttctttctttttttaaccacacaattaatctaataactactggtattaagttagtttattttccatttttcatatataagttaggatttctaattaaaattgacatttcgtaccaccactacaaaaaaataatgtatcagtggcacaaaaaaatatattggcatcacttgtttttttagtcattaatattttgtagcatcacaaaaaatatggtgacaagttttctaaaaattacaaattaactgattcgtcagtgatgttaatgattttttagtgcgtcttggcaactaatgttttcatcttatataaaattagaaacaatagcggcaacagcacctgacattgtgtttgtgttttgcgtgtttctatcgcctaatttttgttgagaacgtgttcgtgaaacttggaaaaagagaaaattgaaattttcttgagatatctaccacttaagaaaaacaaatggctgtttccgttttgtctcttatgacatgacatggtacgtcatagatgaagttctgctaaatatatttgatatgatttcttgaacacgttttatatattcccacttcccagttagtgtggttgttgaatctaattaaaacaggaatagtctttgtctacaatatgggtgagcgatgcaaactttccaagggtttagaagttagaactatataggtccacggtcataattttatattcttgattaactttatgttggttaagtcgttcatatttggtcaattcattcatatgagaaaatactgaaatacaaacatggaaaaatgttaattactcttataattggcgcatgcatgcatctaaattatatgattttaataaatagtttttgtcatctacttgatttcaggaaaaggagagttcgtaacatgctcttcacagaagaacttggagttattccacgcggttcttggaggcttgggacaatttggagttatagcaagggcgagaattgctcttgagccagcacccaaaagggtacgtttatagagaattgactagaattttgtcttgtagcttttcctccaccaattcatatagtgacacctaatcgaattgtcatttttttttacggtgaattgtcattttgtaaatctaccaagtggtagttggcacccatatatgtatgaactatagtaccatacatttcattttatgttggtgtgttagtcatccatgatgaacacatacacaaatgaaaataggacgagttatacgtacgtaagggtttgaatcactgaatgtggatttttgaagttgaaagcatattaatcttggtttgaaaaagaaaaaaaaaatcggaagtccctcttgaagttatcatgactcttatattaagccaatagaattagaaaaactataattatgaatgatcatgttaattctttcagtgacttaaaatcttatctacaaaaagtacccttttgaaaaagaccttcacttaagtccatgcatacagtactaatcttacatacttgagagttgagacttgaagcatgaggagatttgaagtctggagaaacaagccaccacatattaattactaccgtattcttatctttatttatccttccaattttgatgggactggttgcacatacattcatacatactaacatacataaatacgtctctctctcatgtatttcattttattatattctatttcgttagtaagtttactagtataagacattattaatggtgaatttttgttggcatgcaggttaagtgggtcagactactttatagtgacttttctgcttttaccaaagaccaggaacgattaatctcaatcaatggaaggaaacaaaagaacgcattggattttctggaagggatgctgctaatgaaccaaggccccataaataattggagatcctctttcttccctctatctgaccatcccagaatagcttctttaataactgaacatagcatcctctactgtcttgaagtggctaaatattatgacgaacaaaccgagttaaatgtggacaaggtaacctcgtctagtcatatctattatatatagttagatcttgtcacatttctttgtttaaaaaataaaataaaaggcacaatcccaaaaagtcaaaagcaaatgcctagatattgtgtgttttcttggatattaattattacaccttaataacccataataatttttttatttttctttgtctctgtaggaaattgaagttttgctccaaggactagcctatatccctggatttaattatgagaaaaatgtctcgtacgttgagttcttgaatagggtccgaagtggagagttgaaacttcagtcacaaggactgtgggaagttcctcacccgtggcttaatttgtttataccaaaatctcaaatcttggattttaattcaggagtattcaaagatatagttcttaaaagaaacatctcctctggaccagtcttggtttatcccatgaatagaaacaagtaagccttgaatgcatgaatcacaatctagtgtcattataattcaggagtgtgtgatgcaatcttttaattttctgaccattcaactcaatatcaattttatttcttttttcaattaaaatgcaaaagagaataataattaataatatgaaatttaattccaggtgggacgataggatgtcagcatctataccagacgaggatgttttctacacagttgggtttttgcactcaagtgggtttgatacttggaaggcatatgatgctcaaaacagagaaattttggagttctgtagagatgctggcatcatggtcaagcaatatcttcccaaccacagcacacaagaagattggacaaaccattttggtgctaaatggatgaaattcttagaaagaaaacatcagtttgatccaagaatgattctatcacctgggcaaaaaatcttccacaaaaaattacagccagtgttttaaatattttccctaataaaaaaagtaaaaatgttttgtggtgggactacctcaattagatggctagctagggacaggtgtacatacagtgtgaccaagaccaagatggcttttgtatgctaaagtttgcattgctagctagagaaattaataaggtggggcattaaaggctgcatgagtacttttggcacctattatgctacatattaccttagatacgttaggttgacaaagtcgtactggtaggtacaagaagcacagttgtctctcacactgtctgtcacccaacttgctatatagtgtgtggagaaattcggatcatattgaagatgctgtgagttatagtcctccaatattaaatgtttaacgattctgtctttctcttatataattttgttttgcattatattactttcgcactggtgcaaacatatatatcaatgattataattaatttatacaatgacgagtataattgtacccaagttgcatgccataatatttgtcaaaaacaaaaagttgtatgccataatcaatccaggttgctagataataagatagatatgaatatgataacataaaatgctattaaagcaacaaataaacaataacacatagtccttatagggttcataattgatcgatgaacctagctagacgttgattttaggttaatttccagcgaggataaaatttattatataaagaaataactaaccaacacaaaataataaaaaattaaaaaaaaacgaagaaacttattttagagatataatttgttttagtatttgattgtaatttgagagattagctaggctctcaccaagtgagatctagagtatattcttaagaaaatatttataataaagaacccttaaacattttgcaaaacaaagggtggaattaatattaacaacaataattataatatcttgaaaattttatgaaaataatatatatatatatatatatatagagagagagagagagagagagagaaaattctcacaaacaatttttatctgttatttcaaattggtgtatgactccttagtccttagttcatttgtttgcacccagtcctgtcttaggtagttgattttatagttaggtaaattaatttctcgcactcttcgcttgattgtcatttatgggttgaactgttgaagtgattttatattttttaataaatttcacctgcaaaaaaactcaccattagcatacgccccccccccccccccccccccctctcccaaaaaaaaaaaaaaaacgaaagaagattaattagaaagaataaggtcgtgaaatgatgttacaaataaggcatatcagaatcagacgcaagggaagaataaaaacgttacaacaattcgcgcacaatgcaccccaaaaaaaaaatgacaggcacacataccttaaggaagaagaatcaacgctttca

SEQ ID NO: 223 - DNA, 5745 bp, Artificial Sequence
  Synthetic polynucleotide
ataaatggtagaaatctgtgggttcaaatgttcaattgctggggatcttcgtgatcatgatgattcatacacaatctctagaaacacgtacgcaaatattaattaatcaatttcctttttatagtctcctcacaattcacatgaaacttcatactctattatccgattccatttccatcgtatctttgaatttgacatttgtttgcccaacatgtaattaactttcccttctcatcttaaagatgtaacatgatatatattataacttgtaattaacccaatatttttaactctctatttttacactcatctgacatgtatttttatttttcatttttttttcttatcacatcacctcttacgtgtacaatttttctctttttcttatttctgtcttccataatagtaattaatattcatcggtccgatatgtatacagcccaaaaaagtgtgtaaaatcatttttgtatttctaaccctctctttctcatgcaagctagcttcttctttctatttatagcccttctcccttcacccaccaacacaccacaactccaaactttttcctcttgttctcttcttcttcaacacaactagtcataatccagctcatctctctctccctctctctttgttctctctttctctttctccaaaatggctctaaactacccttttttaacctacttcatactactgctatattcactgtgggaaaaactgagcaatggaaagctccgattctaccagagcttgacattgataacatatcccacaaactccatgatgaccctgaaaccaaatggcttcaagggactatggccatttaacgcatgaattcccattagctgtgtttcgtccatcttctatagatgacatagtcaccttgataaaatcttcgtacaatagctttgccccttttgacatagctgcgaggggccaaggccactccactcatggacaagccatggctcgtgatgggattgtggtggacatggccagcctaagaaaacaaagaaatggggttgcgattagtgtctctaaggaccctttgatgggtcactatgctgatgttggaggggaacaactctggattgatgtgctacatgccacacttgaatatggacttgcaccagtttcttggactgattatttgtacttgaccgtgggagggacactttctaatgctggaatcagtggccagagcttccgttatggacctcaaatcagcaacgttcatgaaatggatgtcatcactggtatggagttagttgttttttttaatcaataaatgttaatattattagcttgttagttttttttgaaaaaattgaattaactttcgtttcctcttttctttctttttttaaccacacaattaatctaataactactggtattaagttagtttattttccatttttcatatataagttaggatttctaattaaaattgacatttcgtaccaccactacaaaaaaataatgtatcagtggcacaaaaaaatatattggcatcacttgtttttttagtcattaatattttgtagcatcacaaaaaatatggtgacaagttttctaaaaattacaaattaactgattcgtcagtgatgttaatgattttttagtgcgtcttggcaactaatgttttcatcttatataaaattagaaacaatagcggcaacagcacctgacattgtgtttgtgttttgcgtgtttctatcgcctaatttttgttgagaacgtgttcgtgaaacttggaaaaagagaaaattgaaattttcttgagatatctaccacttaagaaaaacaaatggctgtttccgttttgtctcttatgacatgacatggtacgtcatagatgaagttctgctaaatatatttgatatgatttcttgaacacgttttatatattcccacttcccagttagtgtggttgttgaatctaattaaaacaggaatagtctttgtctacaatatgggtgagcgatgcaaactttccaagggtttagaagttagaactatataggtccacggtcataattttatattcttgattaactttatgttggttaagtcgttcatatttggtcaattcattcatatgagaaaatactgaaatacaaacatggaaaaatgttaattactcttataattggcgcatgcatgcatctaaattatatgattttaataaatagtttttgtcatctacttgatttcaggaaaaggagagttcgtaacatgctcttcacagaagaacttggagttattccacgcggttcttggaggcttgggacaatttggagttatagcaagggcgagaattgctcttgagccagcacccaaaagggtacgtttatagagaattgactagaattttgtcttgtagcttttcctccaccaattcatatagtgacacctaatcgaattgtcatttttttttacggtgaattgtcattttgtaaatctaccaagtggtagttggcacccatatatgtatgaactatagtaccatacatttcattttatgttggtgtgttagtcatccatgatgaacacatacacaaatgaaaataggacgagttatacgtacgtaagggtttgaatcactgaatgtggatttttgaagttgaaagcatattaatcttggtttgaaaaagaaaaaaaaaatcggaagtccctcttgaagttatcatgactcttatattaagccaatagaattagaaaaactataattatgaatgatcatgttaattctttcagtgacttaaaatcttatctacaaaaagtacccttttgaaaaagaccttcacttaagtccatgcatacagtactaatcttacatacttgagagttgagacttgaagcatgaggagatttgaagtctggagaaacaagccaccacatattaattactaccgtattcttatctttatttatccttccaattttgatgggactggttgcacatacattcatacatactaacatacataaatacgtctctctctcatgtatttcattttattatattctatttcgttagtaagtttactagtataagacattattaatggtgaatttttgttggcatgcaggttaagtgggtcagactactttatagtgacttttctgcttttaccaaagaccaggaacgattaatctcaatcaatggaaggaaacaaaagaacgcattggattttctggaagggatgctgctaatgaaccaaggccccataaataattggagatcctctttcttccctctatctgaccatcccagaatagcttctttaataactgaacatagcatcctctactgtcttgaagtggctaaatattatgacgaacaaaccgagttaaatgtggacaaggtaacctcgtctagtcatatctattatatatagttagatcttgtcacatttctttgtttaaaaaataaaataaaaggcacaatcccaaaaagtcaaaagcaaatgcctagatattgtgtgttttcttggatattaattattacaccttaataacccataataatttttttatttttctttgtctctgtaggaaattgaagttttgctccaaggactagcctatatccctggatttaattatgagaaaaatgtctcgtacgttgagttcttgaatagggtccgaagtggagagttgaaacttcagtcacaaggactgtgggaagttcctcacccgtggcttaatttgtttataccaaaatctcaaatcttggattttaattcaggagtattcaaagatatagttcttaaaagaaacatctcctctggaccagtcttggtttatcccatgaatagaaacaagtaagccttgaatgcatgaatcacaatctagtgtcattataattcaggagtgtgtgatgcaatcttttaattttctgaccattcaactcaatatcaattttatttcttttttcaattaaaatgcaaaagagaataataattaataatatgaaatttaattccaggtgggacgataggatgtcagcatctataccagacgaggatgttttctacacagttgggtttttgcactcaagtgggtttgatacttggaaggcatatgatgctcaaaacagagaaattttggagttctgtagagatgctggcatcatggtcaagcaatatcttcccaaccacagcacacaagaagattggacaaaccattttggtgctaaatggatgaaattcttagaaagaaaacatcagtttgatccaagaatgattctatcacctgggcaaaaaatcttccacaaaaaattacagccagtgttttaaatattttccctaataaaaaaagtaaaaatgttttgtggtgggactacctcaattagatggctagctagggacaggtgtacatacagtgtgaccaagaccaagatggcttttgtatgctaaagtttgcattgctagctagagaaattaataaggtggggcattaaaggctgcatgagtacttttggcacctattatgctacatattaccttagatacgttaggttgacaaagtcgtactggtaggtacaagaagcacagttgtctctcacactgtctgtcacccaacttgctatatagtgtgtggagaaattcggatcatattgaagatgctgtgagttatagtcctccaatattaaatgtttaacgattctgtctttctcttatataattttgttttgcattatattactttcgcactggtgcaaacatatatatcaatgattataattaatttatacaatgacgagtataattgtacccaagttgcatgccataatatttgtcaaaaacaaaaagttgtatgccataatcaatccaggttgctagataataagatagatatgaatatgataacataaaatgctattaaagcaacaaataaacaataacacatagtccttatagggttcataattgatcgatgaacctagctagacgttgattttaggttaatttccagcgaggataaaatttattatataaagaaataactaaccaacacaaaataataaaaaattaaaaaaaaacgaagaaacttattttagagatataatttgttttagtatttgattgtaatttgagagattagctaggctctcaccaagtgagatctagagtatattcttaagaaaatatttataataaagaacccttaaacattttgcaaaacaaagggtggaattaatattaacaacaataattataatatcttgaaaattttatgaaaataatatatatatatatatatatatagagagagagagagagagagagagaaaattctcacaaacaatttttatctgttatttcaaattggtgtatgactccttagtccttagttcatttgtttgcacccagtcctgtcttaggtagttgattttatagttaggtaaattaatttctcgcactcttcgcttgattgtcatttatgggttgaactgttgaagtgattttatattttttaataaatttcacctgcaaaaaaactcaccattagcatacgccccccccccccccccccccccctctcccaaaaaaaaaaaaaaaacgaaagaagattaattagaaagaataaggtcgtgaaatgatgttacaaataaggcatatcagaatcagacgcaagggaagaataaaaacgttacaacaattcgcgcacaatgcaccccaaaaaaaaaatgacaggcacacataccttaaggaagaagaatcaacgctttca

SEQ ID NO: 224 - DNA, 7398 bp, Artificial Sequence
  Synthetic polynucleotide
ttaaatcggttcaaaattgttgaatcgatccaaaactagtaaatacagtaggttaattgatttcacttgaaatttaaaaaaaaaaaattaaaatgacgtcattttagtttttttttaaattattataacttatatgacatttttaagtgaagtttactttttattattattaatttatgcatactaggtttctgaaatattatattaaaatattatatatatatatatatatatatatatatatatatatatatatatatatatatatatatatatattattaaaatcaattccacttcgattgagctattaacttttgaaccaatatcttccccagttcaatgaccatccaagtctgaaaacattggttaccatcaacgttacccttccgtgaattggaaaagttaatgcaatataggttgatccaaggataagtcctatggtcccagaaagaaaatcttgagagatccttttgataattacccgagtttttactctctccttttaattcacgaaattggaaacttcaattgctaatataaaaagaattttgttagccaatatcatcagggtattgtcaaagaattacaagaaaaaaaaattataagataacataaaaaaataaaaaacaacataattttatatattttaataaaaaattcttttaatttttttttatcaatattctatagttactggcatttgacatgtaaaaatgtaaacatatgaattgataaaatttgaccaatgtttgaccctgagataggaatccaacggccccagttcaattgcaatcttttatttttactacgtgaaggcccaacaatggagaaccttgtggattttattgctgagaatctgtggttacgatgatgacacaccaacacaatcacagaaagcaagtaccgtttggaaggcctaacacttcattaattgcttcattaaatttattttactttctagctgctcaatttaattgctttacacaaatacttcatgacgtttcagaaggagggccaaatacaatctctacaatggttccatcgtatctttgaatttgacatttagcatccctccctttgcacaatgtacaatttgcattttgaatatttttttctcaccttcatatcgtgggactacttctataaccatcctggtgaaaataaataaagcgagggaattacgtaattaaacatatttaaatttctctctcctctgtttaattaatttatcaaaaacaaatatgtgtgcgagtatttaaaaatgtgtaaagtattattattttttaatttttcttttttccttctcatcaatgataaatatactttttaatataaaaatcaaacaataactataaaaaaaacatcttcacttcaattcaacattaaataaaaaataatccctgctttgttattttttacccaccaattatcatatttgttatttattatttttttatgttcttgctataaaggaaatcactatttgactcacacaaaactataaaggaatcaaataatcaattattatttaaaaactctattaaaataacaattacaacaaaatcccttatttttttcttccttatcattattaaaccttcccattctctctttctatctctacatgtttttctcaaattaaatattttctatatcctcctttatcatgcaaattaaagtcctcttccattctatatatagccgctacctcctccacctcctttccccactacaacacacaaacaccaacaaccaaatcaatccatccaccctagaaacaacaaagcactctctcttctctcattctattatcttctctcatcctcttattctctccaaaccaacaaaaaaaaaatggttgctgagaactacccttctcccacatacttcatcctcctgttcataaccataacacgtttgatctccacagtgggcaaaacctcccaatggacgaaggccctgtcgctgcctccggaactcgcctccgtctccctcgacgacaccatcttctgcaagctccgtgacgacccagaggccctccaggaagggcctccagggactacgggaacctcgtccgcgaggttcccttggcagtcttccacccagcctcagcgagcgacatcgcgaggctgatcaagctgtcgtacaacggctctgtccccttcaagattgcggcgagggggcaagggcactcgacaaggggccaggcgatggcacgtgagggggtggtggtggacatggcggggttcagagagagagggaatggagtggggataagggttgtgagtagtgtggaccctaataataagaatggttactactattatgcggatgttggaggggaacagttgtggatcgatgtgctacacgccacgctcgagcatggacttgcacctatgtcctggactgattacttgtacttgacgctgggagggactctctccaatgctggcatcagtggccagacattccgctatggtcctcaaatcaccactgtccgggaaatggacgtaatcaccggtaagaaaactttccattcaaccagttaacttacatgtttttagttttttagcttccaatatccaatagtttataacttgtaagcttcaattttatgttaatttataagctagttttaccctacttttgaaaattcaaggattttggtactacaataactcccttgtcaaactcgttcaattgttggcttagtatcaagtagactcttggatttttaggtgtactttaacaaccatgttaatttaattgatcagggttttaatattatggaaattggccattggacaacttggaatggaaggaaagcgggagatggaaagggaaaagaaattaattagaataattgttaatattagttgcgtgaaaaaaattaaatttgctgaattaaattatggttcatcacgactctatttgtggcaacaccaacgtgccgttttcagaacttcattgcaacagcggttatagtggcgtttattcaattcatattttaatgcatcagactgtgattgcgattgaaattttatgaaatcttgttttataaacttgttcttttgattaggaaacttgattctattttatatatatttaatgtaacgccgaattaatggttgataaacgagtctttgtctaaaattttggcgaatgttagcaagcgttttccacgtggtcccgtacgtgtttgaaaaattcttaatcatggaatcagttcacacgggcagtcatagactcatagactccaattcttgattaattgttttcttattaatattggtccatggtcttattttggtcaattctttttattaaaaataaacgggctgctgaattttaatttactcaagtgtttgttaatgaatatgtgtgcatgcatgcaattatatatatatatatatattactattatttatttgtgttttaatcaaattttggtttggttcaggaaagggagaatttgtgacttgctctcagcagacgaattcggagttgtttcacgcggttcttggaggcttaggacaatttggaattataacaagggcaagaattgctcttgcgccagctccgaagagggtacgtttaaaatcttcggaattgactaggacttgtcttgttgcttcttcctccaacatctctcatatagtaacgcaaatttctaaatatgttacattattaattcaaccaccaagctttgcggaagcatcaaatgtcgttgtcctgaaagcttcatgtcatcatttttcttggcacccatatacacacacatacgtttcacattgtgtcagtgcatattagtcatccatgaaagacacatgtacaaatgaaaacgagaggagttatattaaaatgtgtgttggaaaaatatatatcatattttcataagtcttaattttgaaattaatatacagtaaccctttgagaccttagcaattaagccaataaaaaggctcgtattaaccccaaccaacaactattagaaaatactaacaagtataggtgtatacataaatgattcatttgaattttagtaccttaattatttaactttatccttctatttgacgggactcgttgcataagccatacatacataatcatgcgttcattattgtttttcattatgagttaatgagttgattgtatgaactaatggtgaatttttgttggcaggttaaatgggtgagacttttgtacaatgacttttctgcttttaccaaagaccaggaacaactaatatctatcactggaaggaaacaaaatgtttcactggattatttggaaggattgctgctaatgcaccaaggacccataaataattggagatcttctttcttccctttagccgaccatgcccgaataatttcgctagtaactaaacacagcgtcctctattgcctagaagttgccaaatattatgatggccaaaatgaaaacaatgtggacaaggtaccatctccattcatgtgcatttgccttgatgatgtttcttctattttttcttttaatgttttgatctcaccttatataataaccctttatcacactcaatcttgttatatttttaagagtttaatgataatattatgattttgttgtgaaaaaagagagtttaattgttattatataatcacaaattatcattaatatgacttttaaaataattaataatataaaaattaataaatttatcgtatttaatgagttataattaaatgatcatataaaattattttatattattaacatatagtttttttttctatttttaatatttgttttactataagttgttatattttcaatcttttttctagtataagttttaataatcaatattgtaagtaatattctcatttttcatgttgtgtaggaactccaagttttactacaaggattgagctatatccctggattttactatgaaaaagatgtctcatattttgagttcttgaatagagtccgaagtggagagttgaagctacagtcacaaggactatgggatgttcctcacccgtggcttaatttgtttataccgaaatctcaaatcatggaatttgactcgggcgtgttcaagaatatcatccttaaacgaaacatcaccacaggacctgtcttggtttaccccatgaatagaaacaagtaattgagcttaactaactaatctcaacttatgttgttatcattaggaaaaatgttaattggtacgaaaactatatataccactattttcatttaaattcatgaaagtgaaatttctctttcctaaaacaaattctttctcttaaaatgaatttttgtttttctcaatctccatcaattacttatttccttttttgaatgtttgaaaagtcattcacaacattttcttcataaaagggttattcgtaccaatttaaatagaattgccgttattatcagatgtacaattcttctcttcactcacttcttttccattaaaattgtaaaaaaaaaataaaaaaatcaggtgggacaataggatgtcagcatcaatacccgatgaggatatcttctacacagttggatttttgcattcaagtgggtttgataattggaaggcctatgatgctcaaaataaagaaattctacaattttgtaacgttgctgggatcaaggttaagcaatatcttccccactatcgcacacaagaagattgggcaaaccattttggccctaaatggaggacttttgtagaaagaaaacaccagtttgatccaagaatgattctatcacctggacaaagaatctttaacaattaaaatagctttaaaaatatatattcccccccccccccccccccccaaaaaaaaaaaaattatataatatggtgggactacccaagttagctagctggctgatcacaagtgtgcacataggacccagaattcagatgatagcctttgtacttgtttttgttaagagggtggggttaaaagctgcatgactttggcatatatgtagatcaggttacacatactttagatacgttaggttgacaaaatcatgtgtgaaataagatgcacacagctagctgtgtacctttctttctctctgtccctcaatttgtctatcactaaaaagatttctatatagtttagaacctagtgaagagaaagaaaaaaccattatattgaggatttaattttatcacgttctaatcctatacattaatattcttaaatgtgcaatgagtgtgctcggtgccttaatgattctttatctttgttaattgttatattgtagggttttgtttttgccttcctaattttgtaacaggggcacccctagcaataattgagatcctaggttaactaaggaacagcattattgtgtctaaattgagattcctagctgtatgccataataataaatcatcgtaggttgctagatagatgtgatagcgccaaatgccttccaatactataatctccattgcaagatccttcgttgtgattgtgtagaaaagattacgctgctttacaagagaatactccaagaaagcaagtgattgctccttaatataaagaatcatgcaataaacaaatggtgtcgtaatccataaagtgtatttaatatttgatgaaagagtagtgtagacatcaaacaaaataaagtttgatgcaattcgaattatagatacttgattaatctctaaattatgttgagacaatcatatttgaatttgataagactattatgaacgataaaaaatattataaataataaaaaaatttcatcaaacatttaatacaattatataccttactcaaatttgaaaacctgtacatataggaaaaaaacctttactaaaagaggttaaactcaccatacggatttttatatgtcgaagggatctttaattgtccatcggaaaacatcctaattcataaaaaaggaaagaaagtttagacatgaataattacggaccaatgaatgcaacctacgtctctcaattttaaggagaatttaggaatattatagtatatcactgaaagtacacacaagtggcaatgatgaatattttaatttaaagttttaattggattcgaaattaatcccttcttttttccagaaaaaataataatcatcgagtaatcaagacaatttcccaagtagacaacaagaatacaaaagagaatacgtgacttcgtttcaccatagaaaagaaggaatgcaataacgatgataataattataaaatgaaattgacaaaatatctaaatgcctgtagatatttctacagcgaatgataagtgtttttccattaaaaataagtttcttttgttaagaatttctaacatttttagttccaaaatataggaatgaagccaataagtaagtaagaatttctaacgtctgaaag

SEQ ID NO: 225 - DNA, 5909 bp, Artificial Sequence
  Synthetic polynucleotide
atttagcatccctccctttgcacaatgtacaatttgggttttgaataatttttgtcacaccttcatttcgtgggactacttctctaatctatacccatcctggtgaaaaataaagggagcgagttacttacttaattaaacatacttaagtttctctctgactctctctcctctttttaattaatttatcataaacaaatatgtgtgcgagtattaaacccgtgcaaaatattagtattattgtttaattttttttccttctcatcaatcataaatatactttttaatacaaaataaaaaatagttaactcagaagatttcttcacttaatcacttcgattcaatattaaaaatcaatccacgctttgttgttttttttcccatgacttatcacgtacatttattatttattatttttctgatgttcttactataaagggaatcactatttgtcacacacaaaactataaagggaatcaaatgatcaattcttatttaaaaactctattaattaaaattacaattacaacaaaaccctaattttatcctccttataattaaacctccacattctctctctctctatcaatacatgtgtttctcaaattaaatattttccatatcctccttttatcatgcaaagtcctcttccattctatatatagcccctacctcctccacctcctttccccactacaacacacaccaacaatcaaatcaatccatccaacctagacatctctcatcttctccaaattaacaaaaatggtagctgggaaatacccttcccccacatacttcatcctcctgctcataaccataacacgtttgatctccacagtgggcaagacctcccaatggcctaacgccgcctccggaactcgcctcggtctccctcgatgacaccatcttcagcaagctccgcaacgacccagaggccctccaggggagggcctccagggactacgggaacctcgtccgcgaggttccctcggcggtcttccacccgacctcgtcgagcgacatcgcgaggctgatcaagctgtcgtacaacggttctgtccccttcaagatagcggcgagggggcaagggcactcgacgaggggccaggcgatggtacgtgatggggtggtggtggacatggccgggttcagagagagagggaatggagagggaataagggttgtgatgagtgttgttgtggaccctaataataagaatggttatggttactattatgctgatgttggaggggaacagttgtggatcgatgtgctaaacgccacgcttgagcatggacttgcacctatgtcctggactgattacttgtacttgacggtgggaggaactctctccaatgctggcatcagtggccagacattccgctatggtcctcaaatcaccactgtccgccaaatggacgtcatcactggtaagacaactttcaatttattcagttaattttatcatataattttaccaaatacttataaaccatatcagaaacttttaatttaatcaactaactcacaattagtttaatcatatacttttaatttaatccactaacttataaatttgtaacttttcagcttggaggtttgtaggttataagtctcaactttccactaacttataagttagttttagttttattgtatgtggtacttttgaaaattcaaggattttggtactataataactcgttcaactgttggcttagtatcaaaactcttggattttcaagtgtacttcaacaaccatcttaatttaattgatcagggttttaatattgtgaaaattggtcattggacaacttggaaagtgacacagcttggaaaagaaggaaagagggagatgggaagggaaaagaaagaaaataacttttaaaattagttgcgtgaaaaaattaaggttgctgaattaaattatggttcaccacgactctaattgtggcaacccaacgtgccgtggttgtggatattttcagaactttattgcaacttcggttatagtggcgtttgttcaattcattttttaatgtatcagactgtgattgcgattgaaattttataaaatctttttttttttaaacttgttcttttgattaggattaggaatttcagaaacttgattctatttcatatacttttttttaatgtaataccgaattagtggttgataaacgagtctttgtctacaaatttggtgaatgttagcaaccgctttccatctggtcccatgcttgaaaattttcttaaccatggaaattagttcacacggacagtcatagccttcaattcttgattaattgtttccttttctaaaatatggtgatactattatattattggtccaaggtcttgttttggtcaaatttttttattagaaataaacgggctgctgaattttaatttactcaagtgtttcttaaagaatatgtatgcatgcatgcaattatatattattattattatcattactgttatgtttaatcaagtttaatttggtttggttcaggaaagggagaatttgtgacttgctctcagcagacgaattcggagttgttccacgcggttctgggggcttaggacaatttggaattataacaagggcaagaatcgctcttgccccagctcccaagagggtacgtttaaaatcttcaagaattgactaggactttgtcttgttgcttcttcctccaacatctctcacatagtaacgccaatttctgcatatgttacattattaattcaaccatcaagctttagggaagcatcaaatgtccttgtcctaaatgctttatgtcatcatttttcttggcaccctttcgtttcacattgtgttagtgcatattagtcatccatgaaagacacatgaaaataaaatttgttggaaaaatataaatcatattttcataagtcttttgaaatatacagtaaccttagagaccttaagcaattaagccaataaaaagggtcgtattatcaaaccccaactaacaactattagaaaatactaacaagtataggtgcatacataaatatgtttccactagaaagtatataaagttggtgagatgattcattttgaattttagtaccttaattatttaactttatccttctatttgatgggactcatcgcataagccatacatatatacataatcatgcgttcattattgtttttcattatgagttaatgagttgattgtatgaactaatggtgaatttctcattggcaggttaaatgggtgagacttttgtacaatgacttttctgctttcaccaaagaccaggaacaactaatctcaatcactagaaggaaacaaaatattgcactggattatttggaaggattgctgctaatgcaccaaggacccataaataattggagatcttctttcttccctttagccgaccatgcccgaataatttcgctagtaactaaacacagcgtcctctattgcctagaagttgccaaatattatgatggccaaaatgaaaacaatgtggacaaggtaccgtctccattcatgtgcatttgccttcatgatgtgtcttttatttcttttcttttaattttttgtctcaccttatataataaccctttgtcacactcaatattattatatttttaaagagtttaatggttatacactatttttactttatttaattataaattatcattgatatattttttaagataattatcataaaagttaataaatttatcagttataattgaatgattgtataaaattatttaatttatattgcataatttattttctatttgtaatctttttttactataagttgttatattgtaagtaattaatattctcattttcatgattgtgtaggaactcaaagttttactacaaggactgagctatatccctggattttactatgaaaaagatgtctcgtatgttgagttcttgaatagagttcgaagtggagagttgaagctacaatcacaaggactatgggatgttcctcacccatggcttaatttgtttataccgaaatctcaaatcatggaatttgactcgggcgtgttcaagaatatcatccttaaacgaaacattaccacaggacccgtcttggtttaccccatgaatagaaacaagtaattgagcttaactaactaatctcaatttgtattgttatcattaggaaaaatgttaattggtacgaaaactatatactacactattttcattaaaattcatgaaagtgaaatttctctttcctaaaataacttctttctcttaaaatgaatttttgtttttctcaatctccatcaattacttatttccttttttgaacgtttgaaaagtcattcataacttttttttcataaaaaggtcatttcgtaccaattaaatagcattgcctttattatcatatgtacacaattcttctcttcactcacttctctctttttttttcccattaaaattgtaaaacaaataatcaggtgggacaataggatgtcagcatcaatacccgacgaggatatcttctacacagttggatttttgcattcaagtgggtttgataattggaaggcctatgatgctcaaaataaagaaattctacaattttgtaacgattctgggatcaaggttaagcaatatcttccccactaccgcacacaagaagattggacaaaccattttggccctaaatggaggacttttgtagaaagaaaacaccagtttgatccaaaaatgattctatcacctggacaaagaatctttaacaattaaactagctttaaaaaatatatataatatggtgggactacccaagttagctagctggctgatctcaagtgtacacataggacccagaattcagatgatagcctttgtacttgtttttgttaagagggtggggttaaaagctgcatgactttggcatatatgtagatcaggttacacatactttagatacgttaggttgacaaaatcatgtgtgaaagatgcacacagctagctgtgtacctttctttctctctctctctttctttctctctgtccctcaatttgtctatcactaaaaagattactatagtttagaacctagtgaagatggaaaaaaatcattatatagaggatttaattttatcacacgttctaatcatatacattaatattcttaaatgtgcaatgagtgtgttcggtgccttaatgattctttatctttgttaattgttagtatattatagggttttgtttttcccttcctaattttgtaacggccatccctactagcaataattgagatcctaggttaactaaggaagagcattattgtgtccaaattgagagtcctagctgtatgccataataataaatcatcgtaagttgctagatagatgtgataacgccaaatgccttcaaatactattattaatctccatcgcgagatccttcgttgtgattatgtagaaaagattacgctgcttttacaagagaatactccaagaaagcaagtgattgctccttaatataagaatcatacaataaacaaatggtgttgtagtccataaagtgtatttaatatttgatgaaagagtgtgtagacatcaaagtgataaaactaataaatttaagtttgatgcaattcgaagtcgtagatacttaattaatctctaaatcatattagttttaaaccatacagattttaatatgttgaatggattaatctttaattgtgcattggaaaatattataattcataaaaaaagaaataaagtttagacatgaataattacggactaatgaatgcaacctatatatactacgtctctcaattttgcggagaatttaggaatattatagtatttcactgaaaggacacacaagtggcaatgatgaatattttaattt

SEQ ID NO: 226 - DNA, 5904 bp, Artificial Sequence
  Synthetic polynucleotide
atttagcatccctccctttgcacaatgtacaatttgggttttgaataatttttgtcacaccttcatttcgtgggactacttctctaatctatacccatcctggtgaaaaataaagggagcgagttacttacttaattaaacatacttaagtttctctctgactctctctcctctttttaattaatttatcataaacaaatatgtgtgcgagtattaaacccgtgcaaaatattagtattattgtttaattttttttccttctcatcaatcataaatatactttttaatacaaaataaaaaatagttaactcagaagatttcttcacttaatcacttcgattcaatattaaaaatcaatccacgctttgttgttttttttcccatgacttatcacgtacatttattatttattatttttctgatgttcttactataaagggaatcactatttgtcacacacaaaactataaagggaatcaaatgatcaattcttatttaaaaactctattaattaaaattacaattacaacaaaaccctaattttatcctccttataattaaacctccacattctctctctctctatcaatacatgtgtttctcaaattaaatattttccatatcctccttttatcatgcaaagtcctcttccattctatatatagcccctacctcctccacctcctttccccactacaacacacaccaacaatcaaatcaatccatccaacctagacatctctcatcttctccaaattaacaaaaatggtagctgggaaatacccttcccccacatacttcatcctcctgctcataaccataacacgtttgatctccacagtgggcaagacctcccaataacgccgcctccggaactcgcctcggtctccctcgatgacaccatcttcagcaagctccgcaacgacccagaggccctccaggggagggcctccagggactacgggaacctcgtccgcgaggttccctcggcggtcttccacccgacctcgtcgagcgacatcgcgaggctgatcaagctgtcgtacaacggttctgtccccttcaagatagcggcgagggggcaagggcactcgacgaggggccaggcgatggtacgtgatggggtggtggtggacatggccgggttcagagagagagggaatggagagggaataagggttgtgatgagtgttgttgtggaccctaataataagaatggttatggttactattatgctgatgttggaggggaacagttgtggatcgatgtgctaaacgccacgcttgagcatggacttgcacctatgtcctggactgattacttgtacttgacggtgggaggaactctctccaatgctggcatcagtggccagacattccgctatggtcctcaaatcaccactgtccgccaaatggacgtcatcactggtaagacaactttcaatttattcagttaattttatcatataattttaccaaatacttataaaccatatcagaaacttttaatttaatcaactaactcacaattagtttaatcatatacttttaatttaatccactaacttataaatttgtaacttttcagcttggaggtttgtaggttataagtctcaactttccactaacttataagttagttttagttttattgtatgtggtacttttgaaaattcaaggattttggtactataataactcgttcaactgttggcttagtatcaaaactcttggattttcaagtgtacttcaacaaccatcttaatttaattgatcagggttttaatattgtgaaaattggtcattggacaacttggaaagtgacacagcttggaaaagaaggaaagagggagatgggaagggaaaagaaagaaaataacttttaaaattagttgcgtgaaaaaattaaggttgctgaattaaattatggttcaccacgactctaattgtggcaacccaacgtgccgtggttgtggatattttcagaactttattgcaacttcggttatagtggcgtttgttcaattcattttttaatgtatcagactgtgattgcgattgaaattttataaaatctttttttttttaaacttgttcttttgattaggattaggaatttcagaaacttgattctatttcatatacttttttttaatgtaataccgaattagtggttgataaacgagtctttgtctacaaatttggtgaatgttagcaaccgctttccatctggtcccatgcttgaaaattttcttaaccatggaaattagttcacacggacagtcatagccttcaattcttgattaattgtttccttttctaaaatatggtgatactattatattattggtccaaggtcttgttttggtcaaatttttttattagaaataaacgggctgctgaattttaatttactcaagtgtttcttaaagaatatgtatgcatgcatgcaattatatattattattattatcattactgttatgtttaatcaagtttaatttggtttggttcaggaaagggagaatttgtgacttgctctcagcagacgaattcggagttgttccacgcggttctgggggcttaggacaatttggaattataacaagggcaagaatcgctcttgccccagctcccaagagggtacgtttaaaatcttcaagaattgactaggactttgtcttgttgcttcttcctccaacatctctcacatagtaacgccaatttctgcatatgttacattattaattcaaccatcaagctttagggaagcatcaaatgtccttgtcctaaatgctttatgtcatcatttttcttggcaccctttcgtttcacattgtgttagtgcatattagtcatccatgaaagacacatgaaaataaaatttgttggaaaaatataaatcatattttcataagtcttttgaaatatacagtaaccttagagaccttaagcaattaagccaataaaaagggtcgtattatcaaaccccaactaacaactattagaaaatactaacaagtataggtgcatacataaatatgtttccactagaaagtatataaagttggtgagatgattcattttgaattttagtaccttaattatttaactttatccttctatttgatgggactcatcgcataagccatacatatatacataatcatgcgttcattattgtttttcattatgagttaatgagttgattgtatgaactaatggtgaatttctcattggcaggttaaatgggtgagacttttgtacaatgacttttctgctttcaccaaagaccaggaacaactaatctcaatcactagaaggaaacaaaatattgcactggattatttggaaggattgctgctaatgcaccaaggacccataaataattggagatcttctttcttccctttagccgaccatgcccgaataatttcgctagtaactaaacacagcgtcctctattgcctagaagttgccaaatattatgatggccaaaatgaaaacaatgtggacaaggtaccgtctccattcatgtgcatttgccttcatgatgtgtcttttatttcttttcttttaattttttgtctcaccttatataataaccctttgtcacactcaatattattatatttttaaagagtttaatggttatacactatttttactttatttaattataaattatcattgatatattttttaagataattatcataaaagttaataaatttatcagttataattgaatgattgtataaaattatttaatttatattgcataatttattttctatttgtaatctttttttactataagttgttatattgtaagtaattaatattctcattttcatgattgtgtaggaactcaaagttttactacaaggactgagctatatccctggattttactatgaaaaagatgtctcgtatgttgagttcttgaatagagttcgaagtggagagttgaagctacaatcacaaggactatgggatgttcctcacccatggcttaatttgtttataccgaaatctcaaatcatggaatttgactcgggcgtgttcaagaatatcatccttaaacgaaacattaccacaggacccgtcttggtttaccccatgaatagaaacaagtaattgagcttaactaactaatctcaatttgtattgttatcattaggaaaaatgttaattggtacgaaaactatatactacactattttcattaaaattcatgaaagtgaaatttctctttcctaaaataacttctttctcttaaaatgaatttttgtttttctcaatctccatcaattacttatttccttttttgaacgtttgaaaagtcattcataacttttttttcataaaaaggtcatttcgtaccaattaaatagcattgcctttattatcatatgtacacaattcttctcttcactcacttctctctttttttttcccattaaaattgtaaaacaaataatcaggtgggacaataggatgtcagcatcaatacccgacgaggatatcttctacacagttggatttttgcattcaagtgggtttgataattggaaggcctatgatgctcaaaataaagaaattctacaattttgtaacgattctgggatcaaggttaagcaatatcttccccactaccgcacacaagaagattggacaaaccattttggccctaaatggaggacttttgtagaaagaaaacaccagtttgatccaaaaatgattctatcacctggacaaagaatctttaacaattaaactagctttaaaaaatatatataatatggtgggactacccaagttagctagctggctgatctcaagtgtacacataggacccagaattcagatgatagcctttgtacttgtttttgttaagagggtggggttaaaagctgcatgactttggcatatatgtagatcaggttacacatactttagatacgttaggttgacaaaatcatgtgtgaaagatgcacacagctagctgtgtacctttctttctctctctctctttctttctctctgtccctcaatttgtctatcactaaaaagattactatagtttagaacctagtgaagatggaaaaaaatcattatatagaggatttaattttatcacacgttctaatcatatacattaatattcttaaatgtgcaatgagtgtgttcggtgccttaatgattctttatctttgttaattgttagtatattatagggttttgtttttcccttcctaattttgtaacggccatccctactagcaataattgagatcctaggttaactaaggaagagcattattgtgtccaaattgagagtcctagctgtatgccataataataaatcatcgtaagttgctagatagatgtgataacgccaaatgccttcaaatactattattaatctccatcgcgagatccttcgttgtgattatgtagaaaagattacgctgcttttacaagagaatactccaagaaagcaagtgattgctccttaatataagaatcatacaataaacaaatggtgttgtagtccataaagtgtatttaatatttgatgaaagagtgtgtagacatcaaagtgataaaactaataaatttaagtttgatgcaattcgaagtcgtagatacttaattaatctctaaatcatattagttttaaaccatacagattttaatatgttgaatggattaatctttaattgtgcattggaaaatattataattcataaaaaaagaaataaagtttagacatgaataattacggactaatgaatgcaacctatatatactacgtctctcaattttgcggagaatttaggaatattatagtatttcactgaaaggacacacaagtggcaatgatgaatattttaattt

SEQ ID NO: 227 - DNA, 9718 bp, Artificial Sequence
  Synthetic polynucleotide
ttaaaaatatttaaagacttaattaaaaattattaaatatttcagagatctataaattaatttaacataaatgaaagtgttatcaaatatgtctagctaattgaaaaaaaaaaacttaaataaaaatttctttttacctgtcttattaggtgactaaggatataattgataaacaaaagtaattaattaattataagatctttaactttataaaaaataaataaaaaaatcttttaaaaaaaattcgacaattaaaaagaaattaacagagggagtaacaattttttacattaaaaaataaatttaaaatttgagtttaacggtcgtattatcatttagtgataaattatcgatataaattttaagataattattataaaaattaataaatttattatgataatttataattaaatcaaaatataaaattatttaacaccacgtgcataataatctaattcacaaaaaaaagaggtaatttatatagtctcttttattaccttatttttctgagtagtaataaatagacaccaagtgttaataataaagtttatcctttctcctcctatccgtctctttatttatttttcattacaaactttatcaaatctatcaatttctctctcttctatctttctctttgttctatccatacaacttaaaaatgtggttgtagtctaaaattttgcctctaattactgtctaccgcggtgtacttgacctgtacaattacctttcagatgctattataactagagaaatttagctcaagacttaaaaacaatggaccaagagatgtgctgtttccacaatgaggcacgtgtctcctcggtccagtcacgtgaagatccacgtgcctttactctgagcttgagccttagtagtttttcgtggttctctccctgtcctataaatttgagagcctgtatcttacatcctagacacacagtagtgactagctcattcattacaattcatcaccccagccaccaacccttttttcatgccaaaccacgaatttgcttctaattttcatgccaaaccctttcttctttcttttgagagagacgcaatccgctcctctatcttactggctagatcaattcctttctattaatttgcttctttctcaatttgtacatgccttcgatcttatagacatacatatatctcctaaactgcacatagagatttaaaaaaaaagaacaagttacaagtagaatttttttggcaagaatcgaagaaagtgagtgagagaaaagaatcttcatctttctgcatgttgcgtacagaatctttaaagccaaatcctgctcacgttaacccacgacgctgttccaagattttgttctcttctctggagcttcccaacattcttcctttccctcatccaccacccccactacccaataactcatcatcatcgtacgccacacacatgacatgcatgtatcttcattaattccttagcgaaaccacacgtactctagcttgtggggtagtttttaattattagttattcttatcttgttcaattcatggctgtcaacaacttgttctgttaacattcgccatatgccgtttaatagtaactgtgggattaacggtggtcccggagctgctcgatgtgggactccagggtcgtctcagcgtggacacgttggaactggaggcggcttcggtggatttcgggaggctgagtcgaggggagccttcggaggtagtgcaccctgccacggcggaggatgtggctagggtggtgaaggcggcgttcgagtctccgttcgccgtgtcagcgagggggcacgggcattcgataaacgggcaagccatgataaaagagaagaaaggagtggtgattgaaatgggaaaaagtgatagtggtgaggatggtagtagtattagagtgagtgagaaaggaatgtatgtggacgtgtggggtgggaagttgtggatagatgttttgagtgcaacattggagtatgggctggctcccatgtcttggaccgattacttgtatttgtctgtgggtggaaccctatccaacgctggaattagtggacaaaccttcaatcacggtcctcagatcaccaatgtttatgagctcgatgtcgttacaggtaatttaatatataatataatttgcattcacttttaactaatcacaaatatcattattggtatacttttttaaggtacaatttttgcattcacggttaatttttacaataatagtactatgtttaacatttgacaccttcaaagagaaaaaaaggagttctaccattataaatgattctaaagatggatttatattttcgaaaattaatgtttattatatacatttttaaataatttaaatttgttggtgttattgttgccaaatttgattgttttaccgtaagaaatgatgcttgtgcatgctaataactagttgttcttgttccccaagaggaaaagttaattttcactaattaaacagaggtgtcccactggtttgtcatggtgctgagtacaaacgaatctcgtttatctttagcgtggttaatctcgttgatatcataatgtgtactggtgtgtaacaggaaagggtgagctggtgacatgttcagaagatcgtaactcggagttgttccatgctgttctaggtggtcttggacaatttggaatcatcacaagggctagaattgctctcgaaccagctcctcacagagtgtgtatctctcccacgtactttatctttctttgtctctttttcttactcacacatatacagtacccaattccctctttcctaattgtatgactctcttttcgtactagctcgtgacctcgcacataatatgctaacatttcatgtaataattgaagataaagttataaaaatgaataatattatctgttttcataatgcatacatatacttcatttttattttttagaaacaactcaatgtaaataaaatttaaagtgtaaatattatttctttttttccatcatggaaaaaaaaagtcggttgaacatgatttccatgagatgataggaggggcacacacgatgcgtcttttcttggaaatctttcttcacatcagcgacaaaacctaaaaaaagggtcgttttcgaagggatggtttgggtactcttctaacaatataaagctggaataattatcgtttgcgtgtcgcctgcctgggacattctctgttttaattcatttctcttaacgaactaatatcactatcgattaagggaactgatatcaatgagctataacaatagaatattctcgtctaattaatattattagggtttaatttctatttactgtaaattaatattactataagaaattttacattttcaatcaatcatacatcatcgtggtggtataacttttaaagtgataattactataaaaaggaacatatacttctcatacatgtttatttataattgagagattagataaaatttgtttacacgttcaatagatatattattttctccaataaaattatattagagttagatatatgataaatatttaagtgcaggttcggtggatacgagtactgtattcgaattttgcaaggttttgtaaggaccaggagtatctgatatctctgcatgggaaagcagcaagggagagattcgactatgtggagggtttcgtgatagttgatgaagggctgatcaataattggaggtcttcgttcttttcagctagtaacccagttaaaatcacttccctcaacgctgacggaggtgttttgtactgcttggagattaccaaaaattacgaccaaggaaacgcagattctgttgatgaggtacgtacacacccaatcccacgtacattttctcttctttgtcagtgccttcacttatatataatattattgactgttcatacacttagtgcgctgtcacaataaaatatattcatttaactttcattagtttaattatgtgaagttaccttatttcgtttactaataacgtgttcatatcttatttattgcgtactccacttcgtgtacacattataattgtcattttttatcattttacaccaagaaaataataaataaataagactaataataattttataaaattaatattttattattattaattcatttataaattttgttatttataattaatatgataagcgatataattaaaaaataataattaatgttacatttaaaaattaaaatgataattattttgaaatatttttttctcttgtatgacagttactttaatgttgaagaaaatttagatagaattaaacaaaatgattggacaaaataattaatatattaaagttaaaattaaattatttcagtattatttaagtttgatatttaataaaaataattttttattcgattttacttattttttgattgaattctagattagttgagattcaatttttttaatgagttggagggataggaaaaaaatagttagatagaattaattcttgaaagagtgaaaaaaaaatacattgaagcttttttttattgaaacgtgtaagaatcgagattctaacaaaaaataaaacagggcttaagtagttaagtttttaccaaaatcactccacctagctagctaatgttgcctgtttaatttactttatgtatttttatttttttttcggttacatccatttgtttaaaataattgtttctcaaatatgctacttgatgtccatgttgttcaaattctaaactctagaaaagacatgaaatataagtatgtgtcagaataattaattaagtcttcgggctttttcgtccagtttttgttagttggtcaacacatttatgcttcagagattctataggatttatagggagcaaaatataaaattaacaggcaaacataaaaggacaaaattaatggcgttgatttgaacatcaattaaaaagtaacattgatattcataacaaattaacagacaaatgtgaaagaacaaaaatagcattattcaataccagttgtttttaccacattaaatttgaacgtttagttttgagtcatctgtcctttctctctttatcgttctacccttgagaagatcaacggaagaaatatgtcaattattctgacgaatactctcatatgattatgcgattaatgtcaagattttcttcgttcacaaattcatgcttactttaataattcagtatctgtctgttttatgtttgaagtctgatttaatattgttaatggtatctttaagtaattggtcaaacaattcaattaacaagaaaaatgatatacgctgtccagaggtaatcacattttatttaatttcataatttattgaattaaaaccttggttcttccttcatcgctgtcctcgtatatgattattctctgtacccaaacattgaccagtctctagttgtagaacagaatgcaataaaacatacaaaagaaaacatgtggaagatcttgtgcaatctatcatctcgattcaatcgcaagattgaatgcaacctttacaatagttaattttcactgtttaaaaatgccggcagtccaccagaatattctctcacttgtttttaacttctcttaattaattcttgtcaaagctatatataactgctcacaatagtgggtctcatatcccgacaaaagcaccggctaccttagctagcagctttcctttttcatgcataactatttaatttaagacctagagaggaaaaaagagataaatatagtttaaataagtgatatgatgttatagaaaaataaacataaaatatgttactagagtatttcatttatatatatatatatatactccacttttataaatatatttaaataaatagttatttgtattttgatctactagaatgacgtatgagagatttttttttaatctttaatttttgttattaagtacttatgtttttaaagttaaacaaagttagtctttctattaatattctttacaaaacgtcaaaacctttaagttcattttctgtttaaaatatttataaattatatctattacattatttaaatactttttattcgaagcataccaaccgaaattaaacatcaaaagacattttcttagatttctctttgtacgtttttatggtatgcaggaaatacaagctctattgaaaaagttaaattttataccaacatcggttttcacaacggacttgccttacgtggattttctggatcgtgtacataaggcagagctgaagcttagatccaagggtttatgggatgtacctcatccgtggctcaacctttttgttccaaaatcaaggataggggacttcgacaagggtgtgttcaagggcattcttggaaataagacaagtggacctatcctcatataccctatgaacaaaaacaagtaagtttataaatatatatttccgcatgcatatccatttgttatactatcatattcatccatgtcctagtcatatatatgtagaataaaaccactgcatgtttgcaggcatgcacatatctcctcatatataaaccacatgtctgctgctgatagcctcatatcgactgtcagtgtttagggaagaagaaaagaaaagaaaaagttcaaatgagtaatgaaatagagtatgaagttttgtgatcatatatgaaagagaaaaacctgcaacataatatatattttctacaacgaatattcccaataattatggaactagatgaaaatgtgtgaagattctccacgattgatggacagatagtactattgtcggaattaatggattagggaataaacagaatctagacgtttacattaatcctaataatagatggctgaatctgtttgtttctactttcattgtgtgtattaattaatccaggtcctcgataattcttgaattaaagaagattctgtttgataaatttgtctacacttaattaaacactgacaaaaaaaactaaaatgaattaatttatttttataaattaaaatttacatctcaataaaatattagctatagataacttaaattaagaatgcttaatccaattaagtgaaaataaaaaatatgaaaagaacaagaagcacagtgaggtgcatgtagtggaaagacatggaagacacacgagggttgtattgtagccaacatagcagatgaaaatctgcatcaaagccagctaggaagtgccacgtttattatttcttgaccagaagcaaacaaaatggatggccatgatcatccaactggagagattctggtgtcagaagatcttccatagggacccactcctcgaatggtagggatgtctcctctccactcctcaccttttatactaacctagttccatagacaccgccatatgcatcaacttccaggtcaatatcaatataatatgcacaaataaacaaataaaaaccataataattgcacttagttatgttttttttttttcattttaaaaataccaaaaattaatgataatgatatcacaaataaaaataaaaatgcatgtttgttagagggtatataatataagaaagacaacgcttgtccaaagcatttatatatagagagagagaataagataaaaaattaaatgaattctatgtatcttgccataggtttctgactgataagtcgatggattattaatgtttttgaattagaccacgaattagaaatacttaaaaaagttctattgttatttcaacagagtagtagtaagtaaagtaaatggtttcaagtgtgcagtatagatgaatagaaaaattcaaaagatgattttgggcgatggtgatgtgtaggtgggaccagcgaagctcggtggtgacaccagaagaggatgtgttttacctggtggcatttctaagatcggcattggatactgagacgctggagtacctgactaatcagaaccgtcaaattctgaaattctgccatgatatagagatcaaggtaaaacaatacctgccccattacactacgcagcaggagtggatggaccactttggtgataagtggacccagttcaatgctaggaagatgcaattcgatccccgccgaatcttagccacaggccagcaaatttttcagtttcatccctcactcaccctcaatatgtagaacaaacatgcaaaatggataaataatcttgggttcatgttgagtagcaagtgctgtattattgtaattaggaaatacaaggaggatcatggcaaaaaaagaattagaaggatgtagttgtagtgcactagtgaaggatcaagagttgttgaggtgttgttatctgagggtaataaaattgatgatggagttggatttttgttatgtaatggggtcttgtagcaaattaagtaaggaacccaataaggattaggcccaaagaatataaggagtggtggggcccgctttggaggaggaaaagggcaatgcgcaagtgcacatgagcaccgcccgtctggtttggctgtctcgtttttcaatatagatatcttttattacccatccaaattcctcgtacatataattcttctagatgtattagtctgtatgtttatttcaaatggaaacatttaatcagtgactccttataaaacataatcaacggcatttatgaataaagttaataagttaagagggaaaggaaagaggagaggaaaatgttcaaatgaatcaaatttctcccattaacatttttaataaaattaatatttatcgataaaaaaaatatcaacaagttaagaaaataataataatagacatgtattgctaatataaaagtttccgtacacaattaattaattagaaactatcttaaatatcacttttaacaaagtaataatataaatcaataacataactttttttttatcactataatattaatgtgacatatttgtctattttgagaggttggaaacttggagacgagctctagaaacacatgactttcgcctaaacagaagcaaatcggagtatatggaatgtaagttcaacaaaagtaagagggtatctaactcagatgtgaaaatagaagaccatattatccctcaagtcacacagtttaaatatcttgggtctgtaatacaggatgatggagaaattgaaggggatgtgaatcatcgcattcaagcaggatggatgaaatggagaaaagcatcaggggtgttatgtgatgcaaaggtaccgatcaagctaaagggaaagttttatcggactgcggtaagaccggcgattttgtacggaacagaatgttgggcggtcaagagccaacatgagactaaagtaggtgtagcggagatgaggatgttgcggtggatgtgtggtaagactcgacaggataaaattagaaacggagctattagagagagggttggagtagcgcctattgtagagaagatggtggaaaatagacttaggtgatttgggcatgtagagagaagaccggtagactctgtagtgaggagagtagaccagatggagagaaggcaaacaattcgagacagaggaagacccaaaaaaactataagagaagttatcaagaaggatttcgaacttaatgatttggatagaagtatggtacttgatagaacattatggcagaagttgatccatgtagccgaccccacctagtgggataaggtgttgttgttgttgttgtatttgtctattttattaatgattaatttctgttggagaacttaatt

SEQ ID NO: 228 - DNA, 5762 bp, Artificial Sequence
  Synthetic polynucleotide
ataaatggtagaaatctgtgggttcaaatgttcaattgctggggatcttcgtgatcatgatgattcatacacaatctctagaaacacgtacgcaaatattaattaatcaatttcctttttatagtctcctcacaattcacatgaaacttcatactctattatccgattccatttccatcgtatctttgaatttgacatttgtttgcccaacatgtaattaactttcccttctcatcttaaagatgtaacatgatatatattataacttgtaattaacccaatatttttaactctctatttttacactcatctgacatgtatttttatttttcatttttttttcttatcacatcacctcttacgtgtacaatttttctctttttcttatttctgtcttccataatagtaattaatattcatcggtccgatatgtatacagcccaaaaaagtgtgtaaaatcatttttgtatttctaaccctctctttctcatgcaagctagcttcttctttctatttatagcccttctcccttcacccaccaacacaccacaactccaaactttttcctcttgttctcttcttcttcaacacaactagtcataatccagctcatctctctctccctctctctttgttctctctttctctttctccaaaatggctctaaactacccttttttaacctacttcatactactgctagtaacccgtttgatattcactgtgggaaaaactgagcaatggaaagctccgattctaccagagcttgacattgataacatatcccacaaactccatgatgaccctgaaaccattcaaatggcttcaagggactatggccatttaacgcatgaattcccattagctgtgtttcgtccatcttctatagatgacatagtcaccttgataaaatcttcgtacaatagctttgccccttttgacatagctgcgaggggccaaggccactccactcatggacaagccatggctcgtgatgggattgtggtggacatggccagcctaagaaaacaaagaaatggggttgcgattagtgtctctaaggaccctttgatgggtcactatgctgatgttggaggggaacaactctggattgatgtgctacatgccacacttgaatatggacttgcaccagtttcttggactgattatttgtacttgaccgtgggagggacactttctaatgctggaatcagtggccagagcttccgttatggacctcaaatcagcaacgttcatgaaatggatgtcatcactggtatggagttagttgttttttttaatcaataaatgttaatattattagcttgttagttttttttgaaaaaattgaattaactttcgtttcctcttttctttctttttttaaccacacaattaatctaataactactggtattaagttagtttattttccatttttcatatataagttaggatttctaattaaaattgacatttcgtaccaccactacaaaaaaataatgtatcagtggcacaaaaaaatatattggcatcacttgtttttttagtcattaatattttgtagcatcacaaaaaatatggtgacaagttttctaaaaattacaaattaactgattcgtcagtgatgttaatgattttttagtgcgtcttggcaactaatgttttcatcttatataaaattagaaacaatagcggcaacagcacctgacattgtgtttgtgttttgcgtgtttctatcgcctaatttttgttgagaacgtgttcgtgaaacttggaaaaagagaaaattgaaattttcttgagatatctaccacttaagaaaaacaaatggctgtttccgttttgtctcttatgacatgacatggtacgtcatagatgaagttctgctaaatatatttgatatgatttcttgaacacgttttatatattcccacttcccagttagtgtggttgttgaatctaattaaaacaggaatagtctttgtctacaatatgggtgagcgatgcaaactttccaagggtttagaagttagaactatataggtccacggtcataattttatattcttgattaactttatgttggttaagtcgttcatatttggtcaattcattcatatgagaaaatactgaaatacaaacatggaaaaatgttaattactcttataattggcgcatgcatgcatctaaattatatgattttaataaatagtttttgtcatctacttgatttcaggaaaaggagagttcgtaacatgctcttcacagaagaacttggagttattccacgcggttcttggaggcttgggacaatttggagttatagcaagggcgagaattgctcttgagccagcacccaaaagggtacgtttatagagaattgactagaattttgtcttgtagcttttcctccaccaattcatatagtgacacctaatcgaattgtcatttttttttacggtgaattgtcattttgtaaatctaccaagtggtagttggcacccatatatgtatgaactatagtaccatacatttcattttatgttggtgtgttagtcatccatgatgaacacatacacaaatgaaaataggacgagttatacgtacgtaagggtttgaatcactgaatgtggatttttgaagttgaaagcatattaatcttggtttgaaaaagaaaaaaaaaatcggaagtccctcttgaagttatcatgactcttatattaagccaatagaattagaaaaactataattatgaatgatcatgttaattctttcagtgacttaaaatcttatctacaaaaagtacccttttgaaaaagaccttcacttaagtccatgcatacagtactaatcttacatacttgagagttgagacttgaagcatgaggagatttgaagtctggagaaacaagccaccacatattaattactaccgtattcttatctttatttatccttccaattttgatgggactggttgcacatacattcatacatactaacatacataaatacgtctctctctcatgtatttcattttattatattctatttcgttagtaagtttactagtataagacattattaatggtgaatttttgttggcatgcaggttaagtgggtcagactactttatagtgacttttctgcttttaccaaagaccaggaacgattaatctcaatcaatggaaggaaacaaaagaacgcattggattttctggaagggatgctgctaatgaaccaaggccccataaataattggagatcctctttcttccctctatctgaccatcccagaatagcttctttaataactgaacatagcatcctctactgtcttgaagtggctaaatattatgacgaacaaaccgagttaaatgtggacaaggtaacctcgtctagtcatatctattatatatagttagatcttgtcacatttctttgtttaaaaaataaaataaaaggcacaatcccaaaaagtcaaaagcaaatgcctagatattgtgtgttttcttggatattaattattacaccttaataacccataataatttttttatttttctttgtctctgtaggaaattgaagttttgctccaaggactagcctatatccctggatttaattatgagaaaaatgtctcgtacgttgagttcttgaatagggtccgaagtggagagttgaaacttcagtcacaaggactgtgggaagttcctcacccgtggcttaatttgtttataccaaaatctcaaatcttggattttaattcaggagtattcaaagatatagttcttaaaagaaacatctcctctggaccagtcttggtttatcccatgaatagaaacaagtaagccttgaatgcatgaatcacaatctagtgtcattataattcaggagtgtgtgatgcaatcttttaattttctgaccattcaactcaatatcaattttatttcttttttcaattaaaatgcaaaagagaataataattaataatatgaaatttaattccaggtgggacgataggatgtcagcatctataccagacgaggatgttttctacacagttgggtttttgcactcaagtgggtttgatacttggaaggcatatgatgctcaaaacagagaaattttggagttctgtagagatgctggcatcatggtcaagcaatatcttcccaaccacagcacacaagaagattggacaaaccattttggtgctaaatggatgaaattcttagaaagaaaacatcagtttgatccaagaatgattctatcacctgggcaaaaaatcttccacaaaaaattacagccagtgttttaaatattttccctaataaaaaaagtaaaaatgttttgtggtgggactacctcaattagatggctagctagggacaggtgtacatacagtgtgaccaagaccaagatggcttttgtatgctaaagtttgcattgctagctagagaaattaataaggtggggcattaaaggctgcatgagtacttttggcacctattatgctacatattaccttagatacgttaggttgacaaagtcgtactggtaggtacaagaagcacagttgtctctcacactgtctgtcacccaacttgctatatagtgtgtggagaaattcggatcatattgaagatgctgtgagttatagtcctccaatattaaatgtttaacgattctgtctttctcttatataattttgttttgcattatattactttcgcactggtgcaaacatatatatcaatgattataattaatttatacaatgacgagtataattgtacccaagttgcatgccataatatttgtcaaaaacaaaaagttgtatgccataatcaatccaggttgctagataataagatagatatgaatatgataacataaaatgctattaaagcaacaaataaacaataacacatagtccttatagggttcataattgatcgatgaacctagctagacgttgattttaggttaatttccagcgaggataaaatttattatataaagaaataactaaccaacacaaaataataaaaaattaaaaaaaaacgaagaaacttattttagagatataatttgttttagtatttgattgtaatttgagagattagctaggctctcaccaagtgagatctagagtatattcttaagaaaatatttataataaagaacccttaaacattttgcaaaacaaagggtggaattaatattaacaacaataattataatatcttgaaaattttatgaaaataatatatatatatatatatatatagagagagagagagagagagagagaaaattctcacaaacaatttttatctgttatttcaaattggtgtatgactccttagtccttagttcatttgtttgcacccagtcctgtcttaggtagttgattttatagttaggtaaattaatttctcgcactcttcgcttgattgtcatttatgggttgaactgttgaagtgattttatattttttaataaatttcacctgcaaaaaaactcaccattagcatacgccccccccccccccccccccccctctcccaaaaaaaaaaaaaaaacgaaagaagattaattagaaagaataaggtcgtgaaatgatgttacaaataaggcatatcagaatcagacgcaagggaagaataaaaacgttacaacaattcgcgcacaatgcaccccaaaaaaaaaatgacaggcacacataccttaaggaagaagaatcaacgctttca

SEQ ID NO: 229 - DNA, 5892 bp, Artificial Sequence
  Synthetic polynucleotide
atttagcatccctccctttgcacaatgtacaatttgggttttgaataatttttgtcacaccttcatttcgtgggactacttctctaatctatacccatcctggtgaaaaataaagggagcgagttacttacttaattaaacatacttaagtttctctctgactctctctcctctttttaattaatttatcataaacaaatatgtgtgcgagtattaaacccgtgcaaaatattagtattattgtttaattttttttccttctcatcaatcataaatatactttttaatacaaaataaaaaatagttaactcagaagatttcttcacttaatcacttcgattcaatattaaaaatcaatccacgctttgttgttttttttcccatgacttatcacgtacatttattatttattatttttctgatgttcttactataaagggaatcactatttgtcacacacaaaactataaagggaatcaaatgatcaattcttatttaaaaactctattaattaaaattacaattacaacaaaaccctaattttatcctccttataattaaacctccacattctctctctctctatcaatacatgtgtttctcaaattaaatattttccatatcctccttttatcatgcaaagtcctcttccattctatatatagcccctacctcctccacctcctttccccactacaacacacaccaacaatcaaatcaatccatccaacctagacatctctcatcttctccaaattaacaaaaatggtagctgggaaatacccttcccccacatacttcatcctcctgctcataaccataacacgtttgatctccacagtgggcaagacctcccaatggaactcgcctcggtctccctcgatgacaccatcttcagcaagctccgcaacgacccagaggccctccaggggagggcctccagggactacgggaacctcgtccgcgaggttccctcggcggtcttccacccgacctcgtcgagcgacatcgcgaggctgatcaagctgtcgtacaacggttctgtccccttcaagatagcggcgagggggcaagggcactcgacgaggggccaggcgatggtacgtgatggggtggtggtggacatggccgggttcagagagagagggaatggagagggaataagggttgtgatgagtgttgttgtggaccctaataataagaatggttatggttactattatgctgatgttggaggggaacagttgtggatcgatgtgctaaacgccacgcttgagcatggacttgcacctatgtcctggactgattacttgtacttgacggtgggaggaactctctccaatgctggcatcagtggccagacattccgctatggtcctcaaatcaccactgtccgccaaatggacgtcatcactggtaagacaactttcaatttattcagttaattttatcatataattttaccaaatacttataaaccatatcagaaacttttaatttaatcaactaactcacaattagtttaatcatatacttttaatttaatccactaacttataaatttgtaacttttcagcttggaggtttgtaggttataagtctcaactttccactaacttataagttagttttagttttattgtatgtggtacttttgaaaattcaaggattttggtactataataactcgttcaactgttggcttagtatcaaaactcttggattttcaagtgtacttcaacaaccatcttaatttaattgatcagggttttaatattgtgaaaattggtcattggacaacttggaaagtgacacagcttggaaaagaaggaaagagggagatgggaagggaaaagaaagaaaataacttttaaaattagttgcgtgaaaaaattaaggttgctgaattaaattatggttcaccacgactctaattgtggcaacccaacgtgccgtggttgtggatattttcagaactttattgcaacttcggttatagtggcgtttgttcaattcattttttaatgtatcagactgtgattgcgattgaaattttataaaatctttttttttttaaacttgttcttttgattaggattaggaatttcagaaacttgattctatttcatatacttttttttaatgtaataccgaattagtggttgataaacgagtctttgtctacaaatttggtgaatgttagcaaccgctttccatctggtcccatgcttgaaaattttcttaaccatggaaattagttcacacggacagtcatagccttcaattcttgattaattgtttccttttctaaaatatggtgatactattatattattggtccaaggtcttgttttggtcaaatttttttattagaaataaacgggctgctgaattttaatttactcaagtgtttcttaaagaatatgtatgcatgcatgcaattatatattattattattatcattactgttatgtttaatcaagtttaatttggtttggttcaggaaagggagaatttgtgacttgctctcagcagacgaattcggagttgttccacgcggttctgggggcttaggacaatttggaattataacaagggcaagaatcgctcttgccccagctcccaagagggtacgtttaaaatcttcaagaattgactaggactttgtcttgttgcttcttcctccaacatctctcacatagtaacgccaatttctgcatatgttacattattaattcaaccatcaagctttagggaagcatcaaatgtccttgtcctaaatgctttatgtcatcatttttcttggcaccctttcgtttcacattgtgttagtgcatattagtcatccatgaaagacacatgaaaataaaatttgttggaaaaatataaatcatattttcataagtcttttgaaatatacagtaaccttagagaccttaagcaattaagccaataaaaagggtcgtattatcaaaccccaactaacaactattagaaaatactaacaagtataggtgcatacataaatatgtttccactagaaagtatataaagttggtgagatgattcattttgaattttagtaccttaattatttaactttatccttctatttgatgggactcatcgcataagccatacatatatacataatcatgcgttcattattgtttttcattatgagttaatgagttgattgtatgaactaatggtgaatttctcattggcaggttaaatgggtgagacttttgtacaatgacttttctgctttcaccaaagaccaggaacaactaatctcaatcactagaaggaaacaaaatattgcactggattatttggaaggattgctgctaatgcaccaaggacccataaataattggagatcttctttcttccctttagccgaccatgcccgaataatttcgctagtaactaaacacagcgtcctctattgcctagaagttgccaaatattatgatggccaaaatgaaaacaatgtggacaaggtaccgtctccattcatgtgcatttgccttcatgatgtgtcttttatttcttttcttttaattttttgtctcaccttatataataaccctttgtcacactcaatattattatatttttaaagagtttaatggttatacactatttttactttatttaattataaattatcattgatatattttttaagataattatcataaaagttaataaatttatcagttataattgaatgattgtataaaattatttaatttatattgcataatttattttctatttgtaatctttttttactataagttgttatattgtaagtaattaatattctcattttcatgattgtgtaggaactcaaagttttactacaaggactgagctatatccctggattttactatgaaaaagatgtctcgtatgttgagttcttgaatagagttcgaagtggagagttgaagctacaatcacaaggactatgggatgttcctcacccatggcttaatttgtttataccgaaatctcaaatcatggaatttgactcgggcgtgttcaagaatatcatccttaaacgaaacattaccacaggacccgtcttggtttaccccatgaatagaaacaagtaattgagcttaactaactaatctcaatttgtattgttatcattaggaaaaatgttaattggtacgaaaactatatactacactattttcattaaaattcatgaaagtgaaatttctctttcctaaaataacttctttctcttaaaatgaatttttgtttttctcaatctccatcaattacttatttccttttttgaacgtttgaaaagtcattcataacttttttttcataaaaaggtcatttcgtaccaattaaatagcattgcctttattatcatatgtacacaattcttctcttcactcacttctctctttttttttcccattaaaattgtaaaacaaataatcaggtgggacaataggatgtcagcatcaatacccgacgaggatatcttctacacagttggatttttgcattcaagtgggtttgataattggaaggcctatgatgctcaaaataaagaaattctacaattttgtaacgattctgggatcaaggttaagcaatatcttccccactaccgcacacaagaagattggacaaaccattttggccctaaatggaggacttttgtagaaagaaaacaccagtttgatccaaaaatgattctatcacctggacaaagaatctttaacaattaaactagctttaaaaaatatatataatatggtgggactacccaagttagctagctggctgatctcaagtgtacacataggacccagaattcagatgatagcctttgtacttgtttttgttaagagggtggggttaaaagctgcatgactttggcatatatgtagatcaggttacacatactttagatacgttaggttgacaaaatcatgtgtgaaagatgcacacagctagctgtgtacctttctttctctctctctctttctttctctctgtccctcaatttgtctatcactaaaaagattactatagtttagaacctagtgaagatggaaaaaaatcattatatagaggatttaattttatcacacgttctaatcatatacattaatattcttaaatgtgcaatgagtgtgttcggtgccttaatgattctttatctttgttaattgttagtatattatagggttttgtttttcccttcctaattttgtaacggccatccctactagcaataattgagatcctaggttaactaaggaagagcattattgtgtccaaattgagagtcctagctgtatgccataataataaatcatcgtaagttgctagatagatgtgataacgccaaatgccttcaaatactattattaatctccatcgcgagatccttcgttgtgattatgtagaaaagattacgctgcttttacaagagaatactccaagaaagcaagtgattgctccttaatataagaatcatacaataaacaaatggtgttgtagtccataaagtgtatttaatatttgatgaaagagtgtgtagacatcaaagtgataaaactaataaatttaagtttgatgcaattcgaagtcgtagatacttaattaatctctaaatcatattagttttaaaccatacagattttaatatgttgaatggattaatctttaattgtgcattggaaaatattataattcataaaaaaagaaataaagtttagacatgaataattacggactaatgaatgcaacctatatatactacgtctctcaattttgcggagaatttaggaatattatagtatttcactgaaaggacacacaagtggcaatgatgaatattttaattt

SEQ ID NO: 230 - DNA, 9703 bp, Artificial Sequence
  Synthetic polynucleotide
ttaaaaatatttaaagacttaattaaaaattattaaatatttcagagatctataaattaatttaacataaatgaaagtgttatcaaatatgtctagctaattgaaaaaaaaaaacttaaataaaaatttctttttacctgtcttattaggtgactaaggatataattgataaacaaaagtaattaattaattataagatctttaactttataaaaaataaataaaaaaatcttttaaaaaaaattcgacaattaaaaagaaattaacagagggagtaacaattttttacattaaaaaataaatttaaaatttgagtttaacggtcgtattatcatttagtgataaattatcgatataaattttaagataattattataaaaattaataaatttattatgataatttataattaaatcaaaatataaaattatttaacaccacgtgcataataatctaattcacaaaaaaaagaggtaatttatatagtctcttttattaccttatttttctgagtagtaataaatagacaccaagtgttaataataaagtttatcctttctcctcctatccgtctctttatttatttttcattacaaactttatcaaatctatcaatttctctctcttctatctttctctttgttctatccatacaacttaaaaatgtggttgtagtctaaaattttgcctctaattactgtctaccgcggtgtacttgacctgtacaattacctttcagatgctattataactagagaaatttagctcaagacttaaaaacaatggaccaagagatgtgctgtttccacaatgaggcacgtgtctcctcggtccagtcacgtgaagatccacgtgcctttactctgagcttgagccttagtagtttttcgtggttctctccctgtcctataaatttgagagcctgtatcttacatcctagacacacagtagtgactagctcattcattacaattcatcaccccagccaccaacccttttttcatgccaaaccacgaatttgcttctaattttcatgccaaaccctttcttctttcttttgagagagacgcaatccgctcctctatcttactggctagatcaattcctttctattaatttgcttctttctcaatttgtacatgccttcgatcttatagacatacatatatctcctaaactgcacatagagatttaaaaaaaaagaacaagttacaagtagaatttttttggcaagaatcgaagaaagtgagtgagagaaaagaatcttcatctttctgcatgttgcgtacagaatctttaaagccaaatcctgctcacgttaacccacgacgctgttccaagattttgttctcttctctggagcttcccaacattcttcctttccctcatccaccacccccactacccaataactcatcatcatcgtacgccacacacatgacatgcatgtatcttcattaattccttagcgaaaccacacgtactctagcttgtggggtagtttttaattattagttattcttatcttgttcaattcttgttctgttaacattcgccatatgccgtttaatagtaactgtgggattaacggtggtcccggagctgctcgatgtgggactccagggtcgtctcagcgtggacacgttggaactggaggcggcttcggtggatttcgggaggctgagtcgaggggagccttcggaggtagtgcaccctgccacggcggaggatgtggctagggtggtgaaggcggcgttcgagtctccgttcgccgtgtcagcgagggggcacgggcattcgataaacgggcaagccatgataaaagagaagaaaggagtggtgattgaaatgggaaaaagtgatagtggtgaggatggtagtagtattagagtgagtgagaaaggaatgtatgtggacgtgtggggtgggaagttgtggatagatgttttgagtgcaacattggagtatgggctggctcccatgtcttggaccgattacttgtatttgtctgtgggtggaaccctatccaacgctggaattagtggacaaaccttcaatcacggtcctcagatcaccaatgtttatgagctcgatgtcgttacaggtaatttaatatataatataatttgcattcacttttaactaatcacaaatatcattattggtatacttttttaaggtacaatttttgcattcacggttaatttttacaataatagtactatgtttaacatttgacaccttcaaagagaaaaaaaggagttctaccattataaatgattctaaagatggatttatattttcgaaaattaatgtttattatatacatttttaaataatttaaatttgttggtgttattgttgccaaatttgattgttttaccgtaagaaatgatgcttgtgcatgctaataactagttgttcttgttccccaagaggaaaagttaattttcactaattaaacagaggtgtcccactggtttgtcatggtgctgagtacaaacgaatctcgtttatctttagcgtggttaatctcgttgatatcataatgtgtactggtgtgtaacaggaaagggtgagctggtgacatgttcagaagatcgtaactcggagttgttccatgctgttctaggtggtcttggacaatttggaatcatcacaagggctagaattgctctcgaaccagctcctcacagagtgtgtatctctcccacgtactttatctttctttgtctctttttcttactcacacatatacagtacccaattccctctttcctaattgtatgactctcttttcgtactagctcgtgacctcgcacataatatgctaacatttcatgtaataattgaagataaagttataaaaatgaataatattatctgttttcataatgcatacatatacttcatttttattttttagaaacaactcaatgtaaataaaatttaaagtgtaaatattatttctttttttccatcatggaaaaaaaaagtcggttgaacatgatttccatgagatgataggaggggcacacacgatgcgtcttttcttggaaatctttcttcacatcagcgacaaaacctaaaaaaagggtcgttttcgaagggatggtttgggtactcttctaacaatataaagctggaataattatcgtttgcgtgtcgcctgcctgggacattctctgttttaattcatttctcttaacgaactaatatcactatcgattaagggaactgatatcaatgagctataacaatagaatattctcgtctaattaatattattagggtttaatttctatttactgtaaattaatattactataagaaattttacattttcaatcaatcatacatcatcgtggtggtataacttttaaagtgataattactataaaaaggaacatatacttctcatacatgtttatttataattgagagattagataaaatttgtttacacgttcaatagatatattattttctccaataaaattatattagagttagatatatgataaatatttaagtgcaggttcggtggatacgagtactgtattcgaattttgcaaggttttgtaaggaccaggagtatctgatatctctgcatgggaaagcagcaagggagagattcgactatgtggagggtttcgtgatagttgatgaagggctgatcaataattggaggtcttcgttcttttcagctagtaacccagttaaaatcacttccctcaacgctgacggaggtgttttgtactgcttggagattaccaaaaattacgaccaaggaaacgcagattctgttgatgaggtacgtacacacccaatcccacgtacattttctcttctttgtcagtgccttcacttatatataatattattgactgttcatacacttagtgcgctgtcacaataaaatatattcatttaactttcattagtttaattatgtgaagttaccttatttcgtttactaataacgtgttcatatcttatttattgcgtactccacttcgtgtacacattataattgtcattttttatcattttacaccaagaaaataataaataaataagactaataataattttataaaattaatattttattattattaattcatttataaattttgttatttataattaatatgataagcgatataattaaaaaataataattaatgttacatttaaaaattaaaatgataattattttgaaatatttttttctcttgtatgacagttactttaatgttgaagaaaatttagatagaattaaacaaaatgattggacaaaataattaatatattaaagttaaaattaaattatttcagtattatttaagtttgatatttaataaaaataattttttattcgattttacttattttttgattgaattctagattagttgagattcaatttttttaatgagttggagggataggaaaaaaatagttagatagaattaattcttgaaagagtgaaaaaaaaatacattgaagcttttttttattgaaacgtgtaagaatcgagattctaacaaaaaataaaacagggcttaagtagttaagtttttaccaaaatcactccacctagctagctaatgttgcctgtttaatttactttatgtatttttatttttttttcggttacatccatttgtttaaaataattgtttctcaaatatgctacttgatgtccatgttgttcaaattctaaactctagaaaagacatgaaatataagtatgtgtcagaataattaattaagtcttcgggctttttcgtccagtttttgttagttggtcaacacatttatgcttcagagattctataggatttatagggagcaaaatataaaattaacaggcaaacataaaaggacaaaattaatggcgttgatttgaacatcaattaaaaagtaacattgatattcataacaaattaacagacaaatgtgaaagaacaaaaatagcattattcaataccagttgtttttaccacattaaatttgaacgtttagttttgagtcatctgtcctttctctctttatcgttctacccttgagaagatcaacggaagaaatatgtcaattattctgacgaatactctcatatgattatgcgattaatgtcaagattttcttcgttcacaaattcatgcttactttaataattcagtatctgtctgttttatgtttgaagtctgatttaatattgttaatggtatctttaagtaattggtcaaacaattcaattaacaagaaaaatgatatacgctgtccagaggtaatcacattttatttaatttcataatttattgaattaaaaccttggttcttccttcatcgctgtcctcgtatatgattattctctgtacccaaacattgaccagtctctagttgtagaacagaatgcaataaaacatacaaaagaaaacatgtggaagatcttgtgcaatctatcatctcgattcaatcgcaagattgaatgcaacctttacaatagttaattttcactgtttaaaaatgccggcagtccaccagaatattctctcacttgtttttaacttctcttaattaattcttgtcaaagctatatataactgctcacaatagtgggtctcatatcccgacaaaagcaccggctaccttagctagcagctttcctttttcatgcataactatttaatttaagacctagagaggaaaaaagagataaatatagtttaaataagtgatatgatgttatagaaaaataaacataaaatatgttactagagtatttcatttatatatatatatatatactccacttttataaatatatttaaataaatagttatttgtattttgatctactagaatgacgtatgagagatttttttttaatctttaatttttgttattaagtacttatgtttttaaagttaaacaaagttagtctttctattaatattctttacaaaacgtcaaaacctttaagttcattttctgtttaaaatatttataaattatatctattacattatttaaatactttttattcgaagcataccaaccgaaattaaacatcaaaagacattttcttagatttctctttgtacgtttttatggtatgcaggaaatacaagctctattgaaaaagttaaattttataccaacatcggttttcacaacggacttgccttacgtggattttctggatcgtgtacataaggcagagctgaagcttagatccaagggtttatgggatgtacctcatccgtggctcaacctttttgttccaaaatcaaggataggggacttcgacaagggtgtgttcaagggcattcttggaaataagacaagtggacctatcctcatataccctatgaacaaaaacaagtaagtttataaatatatatttccgcatgcatatccatttgttatactatcatattcatccatgtcctagtcatatatatgtagaataaaaccactgcatgtttgcaggcatgcacatatctcctcatatataaaccacatgtctgctgctgatagcctcatatcgactgtcagtgtttagggaagaagaaaagaaaagaaaaagttcaaatgagtaatgaaatagagtatgaagttttgtgatcatatatgaaagagaaaaacctgcaacataatatatattttctacaacgaatattcccaataattatggaactagatgaaaatgtgtgaagattctccacgattgatggacagatagtactattgtcggaattaatggattagggaataaacagaatctagacgtttacattaatcctaataatagatggctgaatctgtttgtttctactttcattgtgtgtattaattaatccaggtcctcgataattcttgaattaaagaagattctgtttgataaatttgtctacacttaattaaacactgacaaaaaaaactaaaatgaattaatttatttttataaattaaaatttacatctcaataaaatattagctatagataacttaaattaagaatgcttaatccaattaagtgaaaataaaaaatatgaaaagaacaagaagcacagtgaggtgcatgtagtggaaagacatggaagacacacgagggttgtattgtagccaacatagcagatgaaaatctgcatcaaagccagctaggaagtgccacgtttattatttcttgaccagaagcaaacaaaatggatggccatgatcatccaactggagagattctggtgtcagaagatcttccatagggacccactcctcgaatggtagggatgtctcctctccactcctcaccttttatactaacctagttccatagacaccgccatatgcatcaacttccaggtcaatatcaatataatatgcacaaataaacaaataaaaaccataataattgcacttagttatgttttttttttttcattttaaaaataccaaaaattaatgataatgatatcacaaataaaaataaaaatgcatgtttgttagagggtatataatataagaaagacaacgcttgtccaaagcatttatatatagagagagagaataagataaaaaattaaatgaattctatgtatcttgccataggtttctgactgataagtcgatggattattaatgtttttgaattagaccacgaattagaaatacttaaaaaagttctattgttatttcaacagagtagtagtaagtaaagtaaatggtttcaagtgtgcagtatagatgaatagaaaaattcaaaagatgattttgggcgatggtgatgtgtaggtgggaccagcgaagctcggtggtgacaccagaagaggatgtgttttacctggtggcatttctaagatcggcattggatactgagacgctggagtacctgactaatcagaaccgtcaaattctgaaattctgccatgatatagagatcaaggtaaaacaatacctgccccattacactacgcagcaggagtggatggaccactttggtgataagtggacccagttcaatgctaggaagatgcaattcgatccccgccgaatcttagccacaggccagcaaatttttcagtttcatccctcactcaccctcaatatgtagaacaaacatgcaaaatggataaataatcttgggttcatgttgagtagcaagtgctgtattattgtaattaggaaatacaaggaggatcatggcaaaaaaagaattagaaggatgtagttgtagtgcactagtgaaggatcaagagttgttgaggtgttgttatctgagggtaataaaattgatgatggagttggatttttgttatgtaatggggtcttgtagcaaattaagtaaggaacccaataaggattaggcccaaagaatataaggagtggtggggcccgctttggaggaggaaaagggcaatgcgcaagtgcacatgagcaccgcccgtctggtttggctgtctcgtttttcaatatagatatcttttattacccatccaaattcctcgtacatataattcttctagatgtattagtctgtatgtttatttcaaatggaaacatttaatcagtgactccttataaaacataatcaacggcatttatgaataaagttaataagttaagagggaaaggaaagaggagaggaaaatgttcaaatgaatcaaatttctcccattaacatttttaataaaattaatatttatcgataaaaaaaatatcaacaagttaagaaaataataataatagacatgtattgctaatataaaagtttccgtacacaattaattaattagaaactatcttaaatatcacttttaacaaagtaataatataaatcaataacataactttttttttatcactataatattaatgtgacatatttgtctattttgagaggttggaaacttggagacgagctctagaaacacatgactttcgcctaaacagaagcaaatcggagtatatggaatgtaagttcaacaaaagtaagagggtatctaactcagatgtgaaaatagaagaccatattatccctcaagtcacacagtttaaatatcttgggtctgtaatacaggatgatggagaaattgaaggggatgtgaatcatcgcattcaagcaggatggatgaaatggagaaaagcatcaggggtgttatgtgatgcaaaggtaccgatcaagctaaagggaaagttttatcggactgcggtaagaccggcgattttgtacggaacagaatgttgggcggtcaagagccaacatgagactaaagtaggtgtagcggagatgaggatgttgcggtggatgtgtggtaagactcgacaggataaaattagaaacggagctattagagagagggttggagtagcgcctattgtagagaagatggtggaaaatagacttaggtgatttgggcatgtagagagaagaccggtagactctgtagtgaggagagtagaccagatggagagaaggcaaacaattcgagacagaggaagacccaaaaaaactataagagaagttatcaagaaggatttcgaacttaatgatttggatagaagtatggtacttgatagaacattatggcagaagttgatccatgtagccgaccccacctagtgggataaggtgttgttgttgttgttgtatttgtctattttattaatgattaatttctgttggagaacttaatt

SEQ ID NO: 231 - DNA, 5761 bp, Artificial Sequence; identical to SEQ ID NO: 131
  Synthetic polynucleotide

SEQ ID NO: 232 - DNA, 5762 bp, Artificial Sequence; identical to SEQ ID NO: 228
  Synthetic polynucleotide

SEQ ID NO: 233 - DNA, 5649 bp, Artificial Sequence
  Synthetic polynucleotide
ataaatggtagaaatctgtgggttcaaatgttcaattgctggggatcttcgtgatcatgatgattcatacacaatctctagaaacacgtacgcaaatattaattaatcaatttcctttttatagtctcctcacaattcacatgaaacttcatactctattatccgattccatttccatcgtatctttgaatttgacatttgtttgcccaacatgtaattaactttcccttctcatcttaaagatgtaacatgatatatattataacttgtaattaacccaatatttttaactctctatttttacactcatctgacatgtatttttatttttcatttttttttcttatcacatcacctcttacgtgtacaatttttctctttttcttatttctgtcttccataatagtaattaatattcatcggtccgatatgtatacagcccaaaaaagtgtgtaaaatcatttttgtatttctaaccctctctttctcatgcaagctagcttcttctttctatttatagcccttctcccttcacccaccaacacaccacaactccaaactttttcctcttgttctcttcttcaacacaactacccgtttgatattcactgtgggaaaaactgagcaatggaaagctccgattctaccagagcttgacattgataacatatcccacaaactccatgatgaccctgaaaccattcaaatggcttcaagggactatggccatttaacgcatgaattcccattagctgtgtttcgtccatcttctatagatgacatagtcaccttgataaaatcttcgtacaatagctttgccccttttgacatagctgcgaggggccaaggccactccactcatggacaagccatggctcgtgatgggattgtggtggacatggccagcctaagaaaacaaagaaatggggttgcgattagtgtctctaaggaccctttgatgggtcactatgctgatgttggaggggaacaactctggattgatgtgctacatgccacacttgaatatggacttgcaccagtttcttggactgattatttgtacttgaccgtgggagggacactttctaatgctggaatcagtggccagagcttccgttatggacctcaaatcagcaacgttcatgaaatggatgtcatcactggtatggagttagttgttttttttaatcaataaatgttaatattattagcttgttagttttttttgaaaaaattgaattaactttcgtttcctcttttctttctttttttaaccacacaattaatctaataactactggtattaagttagtttattttccatttttcatatataagttaggatttctaattaaaattgacatttcgtaccaccactacaaaaaaataatgtatcagtggcacaaaaaaatatattggcatcacttgtttttttagtcattaatattttgtagcatcacaaaaaatatggtgacaagttttctaaaaattacaaattaactgattcgtcagtgatgttaatgattttttagtgcgtcttggcaactaatgttttcatcttatataaaattagaaacaatagcggcaacagcacctgacattgtgtttgtgttttgcgtgtttctatcgcctaatttttgttgagaacgtgttcgtgaaacttggaaaaagagaaaattgaaattttcttgagatatctaccacttaagaaaaacaaatggctgtttccgttttgtctcttatgacatgacatggtacgtcatagatgaagttctgctaaatatatttgatatgatttcttgaacacgttttatatattcccacttcccagttagtgtggttgttgaatctaattaaaacaggaatagtctttgtctacaatatgggtgagcgatgcaaactttccaagggtttagaagttagaactatataggtccacggtcataattttatattcttgattaactttatgttggttaagtcgttcatatttggtcaattcattcatatgagaaaatactgaaatacaaacatggaaaaatgttaattactcttataattggcgcatgcatgcatctaaattatatgattttaataaatagtttttgtcatctacttgatttcaggaaaaggagagttcgtaacatgctcttcacagaagaacttggagttattccacgcggttcttggaggcttgggacaatttggagttatagcaagggcgagaattgctcttgagccagcacccaaaagggtacgtttatagagaattgactagaattttgtcttgtagcttttcctccaccaattcatatagtgacacctaatcgaattgtcatttttttttacggtgaattgtcattttgtaaatctaccaagtggtagttggcacccatatatgtatgaactatagtaccatacatttcattttatgttggtgtgttagtcatccatgatgaacacatacacaaatgaaaataggacgagttatacgtacgtaagggtttgaatcactgaatgtggatttttgaagttgaaagcatattaatcttggtttgaaaaagaaaaaaaaaatcggaagtccctcttgaagttatcatgactcttatattaagccaatagaattagaaaaactataattatgaatgatcatgttaattctttcagtgacttaaaatcttatctacaaaaagtacccttttgaaaaagaccttcacttaagtccatgcatacagtactaatcttacatacttgagagttgagacttgaagcatgaggagatttgaagtctggagaaacaagccaccacatattaattactaccgtattcttatctttatttatccttccaattttgatgggactggttgcacatacattcatacatactaacatacataaatacgtctctctctcatgtatttcattttattatattctatttcgttagtaagtttactagtataagacattattaatggtgaatttttgttggcatgcaggttaagtgggtcagactactttatagtgacttttctgcttttaccaaagaccaggaacgattaatctcaatcaatggaaggaaacaaaagaacgcattggattttctggaagggatgctgctaatgaaccaaggccccataaataattggagatcctctttcttccctctatctgaccatcccagaatagcttctttaataactgaacatagcatcctctactgtcttgaagtggctaaatattatgacgaacaaaccgagttaaatgtggacaaggtaacctcgtctagtcatatctattatatatagttagatcttgtcacatttctttgtttaaaaaataaaataaaaggcacaatcccaaaaagtcaaaagcaaatgcctagatattgtgtgttttcttggatattaattattacaccttaataacccataataatttttttatttttctttgtctctgtaggaaattgaagttttgctccaaggactagcctatatccctggatttaattatgagaaaaatgtctcgtacgttgagttcttgaatagggtccgaagtggagagttgaaacttcagtcacaaggactgtgggaagttcctcacccgtggcttaatttgtttataccaaaatctcaaatcttggattttaattcaggagtattcaaagatatagttcttaaaagaaacatctcctctggaccagtcttggtttatcccatgaatagaaacaagtaagccttgaatgcatgaatcacaatctagtgtcattataattcaggagtgtgtgatgcaatcttttaattttctgaccattcaactcaatatcaattttatttcttttttcaattaaaatgcaaaagagaataataattaataatatgaaatttaattccaggtgggacgataggatgtcagcatctataccagacgaggatgttttctacacagttgggtttttgcactcaagtgggtttgatacttggaaggcatatgatgctcaaaacagagaaattttggagttctgtagagatgctggcatcatggtcaagcaatatcttcccaaccacagcacacaagaagattggacaaaccattttggtgctaaatggatgaaattcttagaaagaaaacatcagtttgatccaagaatgattctatcacctgggcaaaaaatcttccacaaaaaattacagccagtgttttaaatattttccctaataaaaaaagtaaaaatgttttgtggtgggactacctcaattagatggctagctagggacaggtgtacatacagtgtgaccaagaccaagatggcttttgtatgctaaagtttgcattgctagctagagaaattaataaggtggggcattaaaggctgcatgagtacttttggcacctattatgctacatattaccttagatacgttaggttgacaaagtcgtactggtaggtacaagaagcacagttgtctctcacactgtctgtcacccaacttgctatatagtgtgtggagaaattcggatcatattgaagatgctgtgagttatagtcctccaatattaaatgtttaacgattctgtctttctcttatataattttgttttgcattatattactttcgcactggtgcaaacatatatatcaatgattataattaatttatacaatgacgagtataattgtacccaagttgcatgccataatatttgtcaaaaacaaaaagttgtatgccataatcaatccaggttgctagataataagatagatatgaatatgataacataaaatgctattaaagcaacaaataaacaataacacatagtccttatagggttcataattgatcgatgaacctagctagacgttgattttaggttaatttccagcgaggataaaatttattatataaagaaataactaaccaacacaaaataataaaaaattaaaaaaaaacgaagaaacttattttagagatataatttgttttagtatttgattgtaatttgagagattagctaggctctcaccaagtgagatctagagtatattcttaagaaaatatttataataaagaacccttaaacattttgcaaaacaaagggtggaattaatattaacaacaataattataatatcttgaaaattttatgaaaataatatatatatatatatatatatagagagagagagagagagagagagaaaattctcacaaacaatttttatctgttatttcaaattggtgtatgactccttagtccttagttcatttgtttgcacccagtcctgtcttaggtagttgattttatagttaggtaaattaatttctcgcactcttcgcttgattgtcatttatgggttgaactgttgaagtgattttatattttttaataaatttcacctgcaaaaaaactcaccattagcatacgccccccccccccccccccccccctctcccaaaaaaaaaaaaaaaacgaaagaagattaattagaaagaataaggtcgtgaaatgatgttacaaataaggcatatcagaatcagacgcaagggaagaataaaaacgttacaacaattcgcgcacaatgcaccccaaaaaaaaaatgacaggcacacataccttaaggaagaagaatcaacgctttca

SEQ ID NO: 234 - DNA, 5899 bp, Artificial Sequence
  Synthetic polynucleotide
atttagcatccctccctttgcacaatgtacaatttgggttttgaataatttttgtcacaccttcatttcgtgggactacttctctaatctatacccatcctggtgaaaaataaagggagcgagttacttacttaattaaacatacttaagtttctctctgactctctctcctctttttaattaatttatcataaacaaatatgtgtgcgagtattaaacccgtgcaaaatattagtattattgtttaattttttttccttctcatcaatcataaatatactttttaatacaaaataaaaaatagttaactcagaagatttcttcacttaatcacttcgattcaatattaaaaatcaatccacgctttgttgttttttttcccatgacttatcacgtacatttattatttattatttttctgatgttcttactataaagggaatcactatttgtcacacacaaaactataaagggaatcaaatgatcaattcttatttaaaaactctattaattaaaattacaattacaacaaaaccctaattttatcctccttataattaaacctccacattctctctctctctatcaatacatgtgtttctcaaattaaatattttccatatcctccttttatcatgcaaagtcctcttccattctatatatagcccctacctcctccacctcctttccccactacaacacacaccaacaatcaaatcaatccatccaacctagacatctctcatcttctccaaattaacaaaaatggtagctgggaaatacccttcccccacatacttcatcctcctgctcataaccataacacgtttgatctccacagtgggcaagaccctaacgccgcctccggaactcgcctcggtctccctcgatgacaccatcttcagcaagctccgcaacgacccagaggccctccaggggagggcctccagggactacgggaacctcgtccgcgaggttccctcggcggtcttccacccgacctcgtcgagcgacatcgcgaggctgatcaagctgtcgtacaacggttctgtccccttcaagatagcggcgagggggcaagggcactcgacgaggggccaggcgatggtacgtgatggggtggtggtggacatggccgggttcagagagagagggaatggagagggaataagggttgtgatgagtgttgttgtggaccctaataataagaatggttatggttactattatgctgatgttggaggggaacagttgtggatcgatgtgctaaacgccacgcttgagcatggacttgcacctatgtcctggactgattacttgtacttgacggtgggaggaactctctccaatgctggcatcagtggccagacattccgctatggtcctcaaatcaccactgtccgccaaatggacgtcatcactggtaagacaactttcaatttattcagttaattttatcatataattttaccaaatacttataaaccatatcagaaacttttaatttaatcaactaactcacaattagtttaatcatatacttttaatttaatccactaacttataaatttgtaacttttcagcttggaggtttgtaggttataagtctcaactttccactaacttataagttagttttagttttattgtatgtggtacttttgaaaattcaaggattttggtactataataactcgttcaactgttggcttagtatcaaaactcttggattttcaagtgtacttcaacaaccatcttaatttaattgatcagggttttaatattgtgaaaattggtcattggacaacttggaaagtgacacagcttggaaaagaaggaaagagggagatgggaagggaaaagaaagaaaataacttttaaaattagttgcgtgaaaaaattaaggttgctgaattaaattatggttcaccacgactctaattgtggcaacccaacgtgccgtggttgtggatattttcagaactttattgcaacttcggttatagtggcgtttgttcaattcattttttaatgtatcagactgtgattgcgattgaaattttataaaatctttttttttttaaacttgttcttttgattaggattaggaatttcagaaacttgattctatttcatatacttttttttaatgtaataccgaattagtggttgataaacgagtctttgtctacaaatttggtgaatgttagcaaccgctttccatctggtcccatgcttgaaaattttcttaaccatggaaattagttcacacggacagtcatagccttcaattcttgattaattgtttccttttctaaaatatggtgatactattatattattggtccaaggtcttgttttggtcaaatttttttattagaaataaacgggctgctgaattttaatttactcaagtgtttcttaaagaatatgtatgcatgcatgcaattatatattattattattatcattactgttatgtttaatcaagtttaatttggtttggttcaggaaagggagaatttgtgacttgctctcagcagacgaattcggagttgttccacgcggttctgggggcttaggacaatttggaattataacaagggcaagaatcgctcttgccccagctcccaagagggtacgtttaaaatcttcaagaattgactaggactttgtcttgttgcttcttcctccaacatctctcacatagtaacgccaatttctgcatatgttacattattaattcaaccatcaagctttagggaagcatcaaatgtccttgtcctaaatgctttatgtcatcatttttcttggcaccctttcgtttcacattgtgttagtgcatattagtcatccatgaaagacacatgaaaataaaatttgttggaaaaatataaatcatattttcataagtcttttgaaatatacagtaaccttagagaccttaagcaattaagccaataaaaagggtcgtattatcaaaccccaactaacaactattagaaaatactaacaagtataggtgcatacataaatatgtttccactagaaagtatataaagttggtgagatgattcattttgaattttagtaccttaattatttaactttatccttctatttgatgggactcatcgcataagccatacatatatacataatcatgcgttcattattgtttttcattatgagttaatgagttgattgtatgaactaatggtgaatttctcattggcaggttaaatgggtgagacttttgtacaatgacttttctgctttcaccaaagaccaggaacaactaatctcaatcactagaaggaaacaaaatattgcactggattatttggaaggattgctgctaatgcaccaaggacccataaataattggagatcttctttcttccctttagccgaccatgcccgaataatttcgctagtaactaaacacagcgtcctctattgcctagaagttgccaaatattatgatggccaaaatgaaaacaatgtggacaaggtaccgtctccattcatgtgcatttgccttcatgatgtgtcttttatttcttttcttttaattttttgtctcaccttatataataaccctttgtcacactcaatattattatatttttaaagagtttaatggttatacactatttttactttatttaattataaattatcattgatatattttttaagataattatcataaaagttaataaatttatcagttataattgaatgattgtataaaattatttaatttatattgcataatttattttctatttgtaatctttttttactataagttgttatattgtaagtaattaatattctcattttcatgattgtgtaggaactcaaagttttactacaaggactgagctatatccctggattttactatgaaaaagatgtctcgtatgttgagttcttgaatagagttcgaagtggagagttgaagctacaatcacaaggactatgggatgttcctcacccatggcttaatttgtttataccgaaatctcaaatcatggaatttgactcgggcgtgttcaagaatatcatccttaaacgaaacattaccacaggacccgtcttggtttaccccatgaatagaaacaagtaattgagcttaactaactaatctcaatttgtattgttatcattaggaaaaatgttaattggtacgaaaactatatactacactattttcattaaaattcatgaaagtgaaatttctctttcctaaaataacttctttctcttaaaatgaatttttgtttttctcaatctccatcaattacttatttccttttttgaacgtttgaaaagtcattcataacttttttttcataaaaaggtcatttcgtaccaattaaatagcattgcctttattatcatatgtacacaattcttctcttcactcacttctctctttttttttcccattaaaattgtaaaacaaataatcaggtgggacaataggatgtcagcatcaatacccgacgaggatatcttctacacagttggatttttgcattcaagtgggtttgataattggaaggcctatgatgctcaaaataaagaaattctacaattttgtaacgattctgggatcaaggttaagcaatatcttccccactaccgcacacaagaagattggacaaaccattttggccctaaatggaggacttttgtagaaagaaaacaccagtttgatccaaaaatgattctatcacctggacaaagaatctttaacaattaaactagctttaaaaaatatatataatatggtgggactacccaagttagctagctggctgatctcaagtgtacacataggacccagaattcagatgatagcctttgtacttgtttttgttaagagggtggggttaaaagctgcatgactttggcatatatgtagatcaggttacacatactttagatacgttaggttgacaaaatcatgtgtgaaagatgcacacagctagctgtgtacctttctttctctctctctctttctttctctctgtccctcaatttgtctatcactaaaaagattactatagtttagaacctagtgaagatggaaaaaaatcattatatagaggatttaattttatcacacgttctaatcatatacattaatattcttaaatgtgcaatgagtgtgttcggtgccttaatgattctttatctttgttaattgttagtatattatagggttttgtttttcccttcctaattttgtaacggccatccctactagcaataattgagatcctaggttaactaaggaagagcattattgtgtccaaattgagagtcctagctgtatgccataataataaatcatcgtaagttgctagatagatgtgataacgccaaatgccttcaaatactattattaatctccatcgcgagatccttcgttgtgattatgtagaaaagattacgctgcttttacaagagaatactccaagaaagcaagtgattgctccttaatataagaatcatacaataaacaaatggtgttgtagtccataaagtgtatttaatatttgatgaaagagtgtgtagacatcaaagtgataaaactaataaatttaagtttgatgcaattcgaagtcgtagatacttaattaatctctaaatcatattagttttaaaccatacagattttaatatgttgaatggattaatctttaattgtgcattggaaaatattataattcataaaaaaagaaataaagtttagacatgaataattacggactaatgaatgcaacctatatatactacgtctctcaattttgcggagaatttaggaatattatagtatttcactgaaaggacacacaagtggcaatgatgaatattttaattt

SEQ ID NO: 235 - DNA, 9720 bp, Artificial Sequence
  Synthetic polynucleotide
ttaaaaatatttaaagacttaattaaaaattattaaatatttcagagatctataaattaatttaacataaatgaaagtgttatcaaatatgtctagctaattgaaaaaaaaaaacttaaataaaaatttctttttacctgtcttattaggtgactaaggatataattgataaacaaaagtaattaattaattataagatctttaactttataaaaaataaataaaaaaatcttttaaaaaaaattcgacaattaaaaagaaattaacagagggagtaacaattttttacattaaaaaataaatttaaaatttgagtttaacggtcgtattatcatttagtgataaattatcgatataaattttaagataattattataaaaattaataaatttattatgataatttataattaaatcaaaatataaaattatttaacaccacgtgcataataatctaattcacaaaaaaaagaggtaatttatatagtctcttttattaccttatttttctgagtagtaataaatagacaccaagtgttaataataaagtttatcctttctcctcctatccgtctctttatttatttttcattacaaactttatcaaatctatcaatttctctctcttctatctttctctttgttctatccatacaacttaaaaatgtggttgtagtctaaaattttgcctctaattactgtctaccgcggtgtacttgacctgtacaattacctttcagatgctattataactagagaaatttagctcaagacttaaaaacaatggaccaagagatgtgctgtttccacaatgaggcacgtgtctcctcggtccagtcacgtgaagatccacgtgcctttactctgagcttgagccttagtagtttttcgtggttctctccctgtcctataaatttgagagcctgtatcttacatcctagacacacagtagtgactagctcattcattacaattcatcaccccagccaccaacccttttttcatgccaaaccacgaatttgcttctaattttcatgccaaaccctttcttctttcttttgagagagacgcaatccgctcctctatcttactggctagatcaattcctttctattaatttgcttctttctcaatttgtacatgccttcgatcttatagacatacatatatctcctaaactgcacatagagatttaaaaaaaaagaacaagttacaagtagaatttttttggcaagaatcgaagaaagtgagtgagagaaaagaatcttcatctttctgcatgttgcgtacagaatctttaaagccaaatcctgctcacgttaacccacgacgctgttccaagattttgttctcttctctggagcttcccaacattcttcctttccctcatccaccacccccactacccaataactcatcatcatcgtacgccacacacatgacatgcatgtatcttcattaattccttagcgaaaccacacgtactctagcttgtggggtagtttttaattattagttattcttatcttgttcaattcatggctgtcaacaacaattgttctgttaacattcgccatatgccgtttaatagtaactgtgggattaacggtggtcccggagctgctcgatgtgggactccagggtcgtctcagcgtggacacgttggaactggaggcggcttcggtggatttcgggaggctgagtcgaggggagccttcggaggtagtgcaccctgccacggcggaggatgtggctagggtggtgaaggcggcgttcgagtctccgttcgccgtgtcagcgagggggcacgggcattcgataaacgggcaagccatgataaaagagaagaaaggagtggtgattgaaatgggaaaaagtgatagtggtgaggatggtagtagtattagagtgagtgagaaaggaatgtatgtggacgtgtggggtgggaagttgtggatagatgttttgagtgcaacattggagtatgggctggctcccatgtcttggaccgattacttgtatttgtctgtgggtggaaccctatccaacgctggaattagtggacaaaccttcaatcacggtcctcagatcaccaatgtttatgagctcgatgtcgttacaggtaatttaatatataatataatttgcattcacttttaactaatcacaaatatcattattggtatacttttttaaggtacaatttttgcattcacggttaatttttacaataatagtactatgtttaacatttgacaccttcaaagagaaaaaaaggagttctaccattataaatgattctaaagatggatttatattttcgaaaattaatgtttattatatacatttttaaataatttaaatttgttggtgttattgttgccaaatttgattgttttaccgtaagaaatgatgcttgtgcatgctaataactagttgttcttgttccccaagaggaaaagttaattttcactaattaaacagaggtgtcccactggtttgtcatggtgctgagtacaaacgaatctcgtttatctttagcgtggttaatctcgttgatatcataatgtgtactggtgtgtaacaggaaagggtgagctggtgacatgttcagaagatcgtaactcggagttgttccatgctgttctaggtggtcttggacaatttggaatcatcacaagggctagaattgctctcgaaccagctcctcacagagtgtgtatctctcccacgtactttatctttctttgtctctttttcttactcacacatatacagtacccaattccctctttcctaattgtatgactctcttttcgtactagctcgtgacctcgcacataatatgctaacatttcatgtaataattgaagataaagttataaaaatgaataatattatctgttttcataatgcatacatatacttcatttttattttttagaaacaactcaatgtaaataaaatttaaagtgtaaatattatttctttttttccatcatggaaaaaaaaagtcggttgaacatgatttccatgagatgataggaggggcacacacgatgcgtcttttcttggaaatctttcttcacatcagcgacaaaacctaaaaaaagggtcgttttcgaagggatggtttgggtactcttctaacaatataaagctggaataattatcgtttgcgtgtcgcctgcctgggacattctctgttttaattcatttctcttaacgaactaatatcactatcgattaagggaactgatatcaatgagctataacaatagaatattctcgtctaattaatattattagggtttaatttctatttactgtaaattaatattactataagaaattttacattttcaatcaatcatacatcatcgtggtggtataacttttaaagtgataattactataaaaaggaacatatacttctcatacatgtttatttataattgagagattagataaaatttgtttacacgttcaatagatatattattttctccaataaaattatattagagttagatatatgataaatatttaagtgcaggttcggtggatacgagtactgtattcgaattttgcaaggttttgtaaggaccaggagtatctgatatctctgcatgggaaagcagcaagggagagattcgactatgtggagggtttcgtgatagttgatgaagggctgatcaataattggaggtcttcgttcttttcagctagtaacccagttaaaatcacttccctcaacgctgacggaggtgttttgtactgcttggagattaccaaaaattacgaccaaggaaacgcagattctgttgatgaggtacgtacacacccaatcccacgtacattttctcttctttgtcagtgccttcacttatatataatattattgactgttcatacacttagtgcgctgtcacaataaaatatattcatttaactttcattagtttaattatgtgaagttaccttatttcgtttactaataacgtgttcatatcttatttattgcgtactccacttcgtgtacacattataattgtcattttttatcattttacaccaagaaaataataaataaataagactaataataattttataaaattaatattttattattattaattcatttataaattttgttatttataattaatatgataagcgatataattaaaaaataataattaatgttacatttaaaaattaaaatgataattattttgaaatatttttttctcttgtatgacagttactttaatgttgaagaaaatttagatagaattaaacaaaatgattggacaaaataattaatatattaaagttaaaattaaattatttcagtattatttaagtttgatatttaataaaaataattttttattcgattttacttattttttgattgaattctagattagttgagattcaatttttttaatgagttggagggataggaaaaaaatagttagatagaattaattcttgaaagagtgaaaaaaaaatacattgaagcttttttttattgaaacgtgtaagaatcgagattctaacaaaaaataaaacagggcttaagtagttaagtttttaccaaaatcactccacctagctagctaatgttgcctgtttaatttactttatgtatttttatttttttttcggttacatccatttgtttaaaataattgtttctcaaatatgctacttgatgtccatgttgttcaaattctaaactctagaaaagacatgaaatataagtatgtgtcagaataattaattaagtcttcgggctttttcgtccagtttttgttagttggtcaacacatttatgcttcagagattctataggatttatagggagcaaaatataaaattaacaggcaaacataaaaggacaaaattaatggcgttgatttgaacatcaattaaaaagtaacattgatattcataacaaattaacagacaaatgtgaaagaacaaaaatagcattattcaataccagttgtttttaccacattaaatttgaacgtttagttttgagtcatctgtcctttctctctttatcgttctacccttgagaagatcaacggaagaaatatgtcaattattctgacgaatactctcatatgattatgcgattaatgtcaagattttcttcgttcacaaattcatgcttactttaataattcagtatctgtctgttttatgtttgaagtctgatttaatattgttaatggtatctttaagtaattggtcaaacaattcaattaacaagaaaaatgatatacgctgtccagaggtaatcacattttatttaatttcataatttattgaattaaaaccttggttcttccttcatcgctgtcctcgtatatgattattctctgtacccaaacattgaccagtctctagttgtagaacagaatgcaataaaacatacaaaagaaaacatgtggaagatcttgtgcaatctatcatctcgattcaatcgcaagattgaatgcaacctttacaatagttaattttcactgtttaaaaatgccggcagtccaccagaatattctctcacttgtttttaacttctcttaattaattcttgtcaaagctatatataactgctcacaatagtgggtctcatatcccgacaaaagcaccggctaccttagctagcagctttcctttttcatgcataactatttaatttaagacctagagaggaaaaaagagataaatatagtttaaataagtgatatgatgttatagaaaaataaacataaaatatgttactagagtatttcatttatatatatatatatatactccacttttataaatatatttaaataaatagttatttgtattttgatctactagaatgacgtatgagagatttttttttaatctttaatttttgttattaagtacttatgtttttaaagttaaacaaagttagtctttctattaatattctttacaaaacgtcaaaacctttaagttcattttctgtttaaaatatttataaattatatctattacattatttaaatactttttattcgaagcataccaaccgaaattaaacatcaaaagacattttcttagatttctctttgtacgtttttatggtatgcaggaaatacaagctctattgaaaaagttaaattttataccaacatcggttttcacaacggacttgccttacgtggattttctggatcgtgtacataaggcagagctgaagcttagatccaagggtttatgggatgtacctcatccgtggctcaacctttttgttccaaaatcaaggataggggacttcgacaagggtgtgttcaagggcattcttggaaataagacaagtggacctatcctcatataccctatgaacaaaaacaagtaagtttataaatatatatttccgcatgcatatccatttgttatactatcatattcatccatgtcctagtcatatatatgtagaataaaaccactgcatgtttgcaggcatgcacatatctcctcatatataaaccacatgtctgctgctgatagcctcatatcgactgtcagtgtttagggaagaagaaaagaaaagaaaaagttcaaatgagtaatgaaatagagtatgaagttttgtgatcatatatgaaagagaaaaacctgcaacataatatatattttctacaacgaatattcccaataattatggaactagatgaaaatgtgtgaagattctccacgattgatggacagatagtactattgtcggaattaatggattagggaataaacagaatctagacgtttacattaatcctaataatagatggctgaatctgtttgtttctactttcattgtgtgtattaattaatccaggtcctcgataattcttgaattaaagaagattctgtttgataaatttgtctacacttaattaaacactgacaaaaaaaactaaaatgaattaatttatttttataaattaaaatttacatctcaataaaatattagctatagataacttaaattaagaatgcttaatccaattaagtgaaaataaaaaatatgaaaagaacaagaagcacagtgaggtgcatgtagtggaaagacatggaagacacacgagggttgtattgtagccaacatagcagatgaaaatctgcatcaaagccagctaggaagtgccacgtttattatttcttgaccagaagcaaacaaaatggatggccatgatcatccaactggagagattctggtgtcagaagatcttccatagggacccactcctcgaatggtagggatgtctcctctccactcctcaccttttatactaacctagttccatagacaccgccatatgcatcaacttccaggtcaatatcaatataatatgcacaaataaacaaataaaaaccataataattgcacttagttatgttttttttttttcattttaaaaataccaaaaattaatgataatgatatcacaaataaaaataaaaatgcatgtttgttagagggtatataatataagaaagacaacgcttgtccaaagcatttatatatagagagagagaataagataaaaaattaaatgaattctatgtatcttgccataggtttctgactgataagtcgatggattattaatgtttttgaattagaccacgaattagaaatacttaaaaaagttctattgttatttcaacagagtagtagtaagtaaagtaaatggtttcaagtgtgcagtatagatgaatagaaaaattcaaaagatgattttgggcgatggtgatgtgtaggtgggaccagcgaagctcggtggtgacaccagaagaggatgtgttttacctggtggcatttctaagatcggcattggatactgagacgctggagtacctgactaatcagaaccgtcaaattctgaaattctgccatgatatagagatcaaggtaaaacaatacctgccccattacactacgcagcaggagtggatggaccactttggtgataagtggacccagttcaatgctaggaagatgcaattcgatccccgccgaatcttagccacaggccagcaaatttttcagtttcatccctcactcaccctcaatatgtagaacaaacatgcaaaatggataaataatcttgggttcatgttgagtagcaagtgctgtattattgtaattaggaaatacaaggaggatcatggcaaaaaaagaattagaaggatgtagttgtagtgcactagtgaaggatcaagagttgttgaggtgttgttatctgagggtaataaaattgatgatggagttggatttttgttatgtaatggggtcttgtagcaaattaagtaaggaacccaataaggattaggcccaaagaatataaggagtggtggggcccgctttggaggaggaaaagggcaatgcgcaagtgcacatgagcaccgcccgtctggtttggctgtctcgtttttcaatatagatatcttttattacccatccaaattcctcgtacatataattcttctagatgtattagtctgtatgtttatttcaaatggaaacatttaatcagtgactccttataaaacataatcaacggcatttatgaataaagttaataagttaagagggaaaggaaagaggagaggaaaatgttcaaatgaatcaaatttctcccattaacatttttaataaaattaatatttatcgataaaaaaaatatcaacaagttaagaaaataataataatagacatgtattgctaatataaaagtttccgtacacaattaattaattagaaactatcttaaatatcacttttaacaaagtaataatataaatcaataacataactttttttttatcactataatattaatgtgacatatttgtctattttgagaggttggaaacttggagacgagctctagaaacacatgactttcgcctaaacagaagcaaatcggagtatatggaatgtaagttcaacaaaagtaagagggtatctaactcagatgtgaaaatagaagaccatattatccctcaagtcacacagtttaaatatcttgggtctgtaatacaggatgatggagaaattgaaggggatgtgaatcatcgcattcaagcaggatggatgaaatggagaaaagcatcaggggtgttatgtgatgcaaaggtaccgatcaagctaaagggaaagttttatcggactgcggtaagaccggcgattttgtacggaacagaatgttgggcggtcaagagccaacatgagactaaagtaggtgtagcggagatgaggatgttgcggtggatgtgtggtaagactcgacaggataaaattagaaacggagctattagagagagggttggagtagcgcctattgtagagaagatggtggaaaatagacttaggtgatttgggcatgtagagagaagaccggtagactctgtagtgaggagagtagaccagatggagagaaggcaaacaattcgagacagaggaagacccaaaaaaactataagagaagttatcaagaaggatttcgaacttaatgatttggatagaagtatggtacttgatagaacattatggcagaagttgatccatgtagccgaccccacctagtgggataaggtgttgttgttgttgttgtatttgtctattttattaatgattaatttctgttggagaacttaatt

SEQ ID NO: 236 - DNA, 7390 bp, Artificial Sequence
  Synthetic polynucleotide
ttaaatcggttcaaaattgttgaatcgatccaaaactagtaaatacagtaggttaattgatttcacttgaaatttaaaaaaaaaaaattaaaatgacgtcattttagtttttttttaaattattataacttatatgacatttttaagtgaagtttactttttattattattaatttatgcatactaggtttctgaaatattatattaaaatattatatatatatatatatatatatatatatatatatatatatatatatatatatatatatatatattattaaaatcaattccacttcgattgagctattaacttttgaaccaatatcttccccagttcaatgaccatccaagtctgaaaacattggttaccatcaacgttacccttccgtgaattggaaaagttaatgcaatataggttgatccaaggataagtcctatggtcccagaaagaaaatcttgagagatccttttgataattacccgagtttttactctctccttttaattcacgaaattggaaacttcaattgctaatataaaaagaattttgttagccaatatcatcagggtattgtcaaagaattacaagaaaaaaaaattataagataacataaaaaaataaaaaacaacataattttatatattttaataaaaaattcttttaatttttttttatcaatattctatagttactggcatttgacatgtaaaaatgtaaacatatgaattgataaaatttgaccaatgtttgaccctgagataggaatccaacggccccagttcaattgcaatcttttatttttactacgtgaaggcccaacaatggagaaccttgtggattttattgctgagaatctgtggttacgatgatgacacaccaacacaatcacagaaagcaagtaccgtttggaaggcctaacacttcattaattgcttcattaaatttattttactttctagctgctcaatttaattgctttacacaaatacttcatgacgtttcagaaggagggccaaatacaatctctacaatggttccatcgtatctttgaatttgacatttagcatccctccctttgcacaatgtacaatttgcattttgaatatttttttctcaccttcatatcgtgggactacttctataaccatcctggtgaaaataaataaagcgagggaattacgtaattaaacatatttaaatttctctctcctctgtttaattaatttatcaaaaacaaatatgtgtgcgagtatttaaaaatgtgtaaagtattattattttttaatttttcttttttccttctcatcaatgataaatatactttttaatataaaaatcaaacaataactataaaaaaaacatcttcacttcaattcaacattaaataaaaaataatccctgctttgttattttttacccaccaattatcatatttgttatttattatttttttatgttcttgctataaaggaaatcactatttgactcacacaaaactataaaggaatcaaataatcaattattatttaaaaactctattaaaataacaattacaacaaaatcccttatttttttcttccttatcattattaaaccttcccattctctctttctatctctacatgtttttctcaaattaaatattttctatatcctcctttatcatgcaaattaaagtcctcttccattctatatatagccgctacctcctccacctcctttccccactacaacacacaaacaccaacaaccaaatcaatccatccaccctagaaacaacaaagcactctctcttctctcattctattatcttctctcatcctcttattctctccaaaccaacaaaaaaaaaatggttgctgagaactacccttctcccacatacttcatcctcctgttcataaacacgtttgatctccacagtgggcaaaacctcccaatggacgaaggccctgtcgctgcctccggaactcgcctccgtctccctcgacgacaccatcttctgcaagctccgtgacgacccagaggccagggaagggcctccagggactacgggaacctcgtccgcgaggttcccttggcagtcttccacccagcctcagcgagcgacatcgcgaggctgatcaagctgtcgtacaacggctctgtccccttcaagattgcggcgagggggcaagggcactcgacaaggggccaggcgatggcacgtgagggggtggtggtggacatggcggggttcagagagagagggaatggagtggggataagggttgtgagtagtgtggaccctaataataagaatggttactactattatgcggatgttggaggggaacagttgtggatcgatgtgctacacgccacgctcgagcatggacttgcacctatgtcctggactgattacttgtacttgacgctgggagggactctctccaatgctggcatcagtggccagacattccgctatggtcctcaaatcaccactgtccgggaaatggacgtaatcaccggtaagaaaactttccattcaaccagttaacttacatgtttttagttttttagcttccaatatccaatagtttataacttgtaagcttcaattttatgttaatttataagctagttttaccctacttttgaaaattcaaggattttggtactacaataactcccttgtcaaactcgttcaattgttggcttagtatcaagtagactcttggatttttaggtgtactttaacaaccatgttaatttaattgatcagggttttaatattatggaaattggccattggacaacttggaatggaaggaaagcgggagatggaaagggaaaagaaattaattagaataattgttaatattagttgcgtgaaaaaaattaaatttgctgaattaaattatggttcatcacgactctatttgtggcaacaccaacgtgccgttttcagaacttcattgcaacagcggttatagtggcgtttattcaattcatattttaatgcatcagactgtgattgcgattgaaattttatgaaatcttgttttataaacttgttcttttgattaggaaacttgattctattttatatatatttaatgtaacgccgaattaatggttgataaacgagtctttgtctaaaattttggcgaatgttagcaagcgttttccacgtggtcccgtacgtgtttgaaaaattcttaatcatggaatcagttcacacgggcagtcatagactcatagactccaattcttgattaattgttttcttattaatattggtccatggtcttattttggtcaattctttttattaaaaataaacgggctgctgaattttaatttactcaagtgtttgttaatgaatatgtgtgcatgcatgcaattatatatatatatatatattactattatttatttgtgttttaatcaaattttggtttggttcaggaaagggagaatttgtgacttgctctcagcagacgaattcggagttgtttcacgcggttcttggaggcttaggacaatttggaattataacaagggcaagaattgctcttgcgccagctccgaagagggtacgtttaaaatcttcggaattgactaggacttgtcttgttgcttcttcctccaacatctctcatatagtaacgcaaatttctaaatatgttacattattaattcaaccaccaagctttgcggaagcatcaaatgtcgttgtcctgaaagcttcatgtcatcatttttcttggcacccatatacacacacatacgtttcacattgtgtcagtgcatattagtcatccatgaaagacacatgtacaaatgaaaacgagaggagttatattaaaatgtgtgttggaaaaatatatatcatattttcataagtcttaattttgaaattaatatacagtaaccctttgagaccttagcaattaagccaataaaaaggctcgtattaaccccaaccaacaactattagaaaatactaacaagtataggtgtatacataaatgattcatttgaattttagtaccttaattatttaactttatccttctatttgacgggactcgttgcataagccatacatacataatcatgcgttcattattgtttttcattatgagttaatgagttgattgtatgaactaatggtgaatttttgttggcaggttaaatgggtgagacttttgtacaatgacttttctgcttttaccaaagaccaggaacaactaatatctatcactggaaggaaacaaaatgtttcactggattatttggaaggattgctgctaatgcaccaaggacccataaataattggagatcttctttcttccctttagccgaccatgcccgaataatttcgctagtaactaaacacagcgtcctctattgcctagaagttgccaaatattatgatggccaaaatgaaaacaatgtggacaaggtaccatctccattcatgtgcatttgccttgatgatgtttcttctattttttcttttaatgttttgatctcaccttatataataaccctttatcacactcaatcttgttatatttttaagagtttaatgataatattatgattttgttgtgaaaaaagagagtttaattgttattatataatcacaaattatcattaatatgacttttaaaataattaataatataaaaattaataaatttatcgtatttaatgagttataattaaatgatcatataaaattattttatattattaacatatagtttttttttctatttttaatatttgttttactataagttgttatattttcaatcttttttctagtataagttttaataatcaatattgtaagtaatattctcatttttcatgttgtgtaggaactccaagttttactacaaggattgagctatatccctggattttactatgaaaaagatgtctcatattttgagttcttgaatagagtccgaagtggagagttgaagctacagtcacaaggactatgggatgttcctcacccgtggcttaatttgtttataccgaaatctcaaatcatggaatttgactcgggcgtgttcaagaatatcatccttaaacgaaacatcaccacaggacctgtcttggtttaccccatgaatagaaacaagtaattgagcttaactaactaatctcaacttatgttgttatcattaggaaaaatgttaattggtacgaaaactatatataccactattttcatttaaattcatgaaagtgaaatttctctttcctaaaacaaattctttctcttaaaatgaatttttgtttttctcaatctccatcaattacttatttccttttttgaatgtttgaaaagtcattcacaacattttcttcataaaagggttattcgtaccaatttaaatagaattgccgttattatcagatgtacaattcttctcttcactcacttcttttccattaaaattgtaaaaaaaaaataaaaaaatcaggtgggacaataggatgtcagcatcaatacccgatgaggatatcttctacacagttggatttttgcattcaagtgggtttgataattggaaggcctatgatgctcaaaataaagaaattctacaattttgtaacgttgctgggatcaaggttaagcaatatcttccccactatcgcacacaagaagattgggcaaaccattttggccctaaatggaggacttttgtagaaagaaaacaccagtttgatccaagaatgattctatcacctggacaaagaatctttaacaattaaaatagctttaaaaatatatattcccccccccccccccccccccaaaaaaaaaaaaattatataatatggtgggactacccaagttagctagctggctgatcacaagtgtgcacataggacccagaattcagatgatagcctttgtacttgtttttgttaagagggtggggttaaaagctgcatgactttggcatatatgtagatcaggttacacatactttagatacgttaggttgacaaaatcatgtgtgaaataagatgcacacagctagctgtgtacctttctttctctctgtccctcaatttgtctatcactaaaaagatttctatatagtttagaacctagtgaagagaaagaaaaaaccattatattgaggatttaattttatcacgttctaatcctatacattaatattcttaaatgtgcaatgagtgtgctcggtgccttaatgattctttatctttgttaattgttatattgtagggttttgtttttgccttcctaattttgtaacaggggcacccctagcaataattgagatcctaggttaactaaggaacagcattattgtgtctaaattgagattcctagctgtatgccataataataaatcatcgtaggttgctagatagatgtgatagcgccaaatgccttccaatactataatctccattgcaagatccttcgttgtgattgtgtagaaaagattacgctgctttacaagagaatactccaagaaagcaagtgattgctccttaatataaagaatcatgcaataaacaaatggtgtcgtaatccataaagtgtatttaatatttgatgaaagagtagtgtagacatcaaacaaaataaagtttgatgcaattcgaattatagatacttgattaatctctaaattatgttgagacaatcatatttgaatttgataagactattatgaacgataaaaaatattataaataataaaaaaatttcatcaaacatttaatacaattatataccttactcaaatttgaaaacctgtacatataggaaaaaaacctttactaaaagaggttaaactcaccatacggatttttatatgtcgaagggatctttaattgtccatcggaaaacatcctaattcataaaaaaggaaagaaagtttagacatgaataattacggaccaatgaatgcaacctacgtctctcaattttaaggagaatttaggaatattatagtatatcactgaaagtacacacaagtggcaatgatgaatattttaatttaaagttttaattggattcgaaattaatcccttcttttttccagaaaaaataataatcatcgagtaatcaagacaatttcccaagtagacaacaagaatacaaaagagaatacgtgacttcgtttcaccatagaaaagaaggaatgcaataacgatgataataattataaaatgaaattgacaaaatatctaaatgcctgtagatatttctacagcgaatgataagtgtttttccattaaaaataagtttcttttgttaagaatttctaacatttttagttccaaaatataggaatgaagccaataagtaagtaagaatttctaacgtctgaaag

SEQ ID NO: 237 - DNA, 7389 bp, Artificial Sequence
  Synthetic polynucleotide
ttaaatcggttcaaaattgttgaatcgatccaaaactagtaaatacagtaggttaattgatttcacttgaaatttaaaaaaaaaaaattaaaatgacgtcattttagtttttttttaaattattataacttatatgacatttttaagtgaagtttactttttattattattaatttatgcatactaggtttctgaaatattatattaaaatattatatatatatatatatatatatatatatatatatatatatatatatatatatatatatatatattattaaaatcaattccacttcgattgagctattaacttttgaaccaatatcttccccagttcaatgaccatccaagtctgaaaacattggttaccatcaacgttacccttccgtgaattggaaaagttaatgcaatataggttgatccaaggataagtcctatggtcccagaaagaaaatcttgagagatccttttgataattacccgagtttttactctctccttttaattcacgaaattggaaacttcaattgctaatataaaaagaattttgttagccaatatcatcagggtattgtcaaagaattacaagaaaaaaaaattataagataacataaaaaaataaaaaacaacataattttatatattttaataaaaaattcttttaatttttttttatcaatattctatagttactggcatttgacatgtaaaaatgtaaacatatgaattgataaaatttgaccaatgtttgaccctgagataggaatccaacggccccagttcaattgcaatcttttatttttactacgtgaaggcccaacaatggagaaccttgtggattttattgctgagaatctgtggttacgatgatgacacaccaacacaatcacagaaagcaagtaccgtttggaaggcctaacacttcattaattgcttcattaaatttattttactttctagctgctcaatttaattgctttacacaaatacttcatgacgtttcagaaggagggccaaatacaatctctacaatggttccatcgtatctttgaatttgacatttagcatccctccctttgcacaatgtacaatttgcattttgaatatttttttctcaccttcatatcgtgggactacttctataaccatcctggtgaaaataaataaagcgagggaattacgtaattaaacatatttaaatttctctctcctctgtttaattaatttatcaaaaacaaatatgtgtgcgagtatttaaaaatgtgtaaagtattattattttttaatttttcttttttccttctcatcaatgataaatatactttttaatataaaaatcaaacaataactataaaaaaaacatcttcacttcaattcaacattaaataaaaaataatccctgctttgttattttttacccaccaattatcatatttgttatttattatttttttatgttcttgctataaaggaaatcactatttgactcacacaaaactataaaggaatcaaataatcaattattatttaaaaactctattaaaataacaattacaacaaaatcccttatttttttcttccttatcattattaaaccttcccattctctctttctatctctacatgtttttctcaaattaaatattttctatatcctcctttatcatgcaaattaaagtcctcttccattctatatatagccgctacctcctccacctcctttccccactacaacacacaaacaccaacaaccaaatcaatccatccaccctagaaacaacaaagcactctctcttctctcattctattatcttctctcatcctcttattctctccaaaccaacaaaaaaaaaatggttgctgagaactacccttctcccacatacttcatcctcctgttcataacacgtttgatctccacagtgggcaaaacctcccaatggacgaaggccctgtcgctgcctccggaactcgcctccgtctccctcgacgacaccatcttctgcaagctccgtgacgacccagaggccagggaagggcctccagggactacgggaacctcgtccgcgaggttcccttggcagtcttccacccagcctcagcgagcgacatcgcgaggctgatcaagctgtcgtacaacggctctgtccccttcaagattgcggcgagggggcaagggcactcgacaaggggccaggcgatggcacgtgagggggtggtggtggacatggcggggttcagagagagagggaatggagtggggataagggttgtgagtagtgtggaccctaataataagaatggttactactattatgcggatgttggaggggaacagttgtggatcgatgtgctacacgccacgctcgagcatggacttgcacctatgtcctggactgattacttgtacttgacgctgggagggactctctccaatgctggcatcagtggccagacattccgctatggtcctcaaatcaccactgtccgggaaatggacgtaatcaccggtaagaaaactttccattcaaccagttaacttacatgtttttagttttttagcttccaatatccaatagtttataacttgtaagcttcaattttatgttaatttataagctagttttaccctacttttgaaaattcaaggattttggtactacaataactcccttgtcaaactcgttcaattgttggcttagtatcaagtagactcttggatttttaggtgtactttaacaaccatgttaatttaattgatcagggttttaatattatggaaattggccattggacaacttggaatggaaggaaagcgggagatggaaagggaaaagaaattaattagaataattgttaatattagttgcgtgaaaaaaattaaatttgctgaattaaattatggttcatcacgactctatttgtggcaacaccaacgtgccgttttcagaacttcattgcaacagcggttatagtggcgtttattcaattcatattttaatgcatcagactgtgattgcgattgaaattttatgaaatcttgttttataaacttgttcttttgattaggaaacttgattctattttatatatatttaatgtaacgccgaattaatggttgataaacgagtctttgtctaaaattttggcgaatgttagcaagcgttttccacgtggtcccgtacgtgtttgaaaaattcttaatcatggaatcagttcacacgggcagtcatagactcatagactccaattcttgattaattgttttcttattaatattggtccatggtcttattttggtcaattctttttattaaaaataaacgggctgctgaattttaatttactcaagtgtttgttaatgaatatgtgtgcatgcatgcaattatatatatatatatatattactattatttatttgtgttttaatcaaattttggtttggttcaggaaagggagaatttgtgacttgctctcagcagacgaattcggagttgtttcacgcggttcttggaggcttaggacaatttggaattataacaagggcaagaattgctcttgcgccagctccgaagagggtacgtttaaaatcttcggaattgactaggacttgtcttgttgcttcttcctccaacatctctcatatagtaacgcaaatttctaaatatgttacattattaattcaaccaccaagctttgcggaagcatcaaatgtcgttgtcctgaaagcttcatgtcatcatttttcttggcacccatatacacacacatacgtttcacattgtgtcagtgcatattagtcatccatgaaagacacatgtacaaatgaaaacgagaggagttatattaaaatgtgtgttggaaaaatatatatcatattttcataagtcttaattttgaaattaatatacagtaaccctttgagaccttagcaattaagccaataaaaaggctcgtattaaccccaaccaacaactattagaaaatactaacaagtataggtgtatacataaatgattcatttgaattttagtaccttaattatttaactttatccttctatttgacgggactcgttgcataagccatacatacataatcatgcgttcattattgtttttcattatgagttaatgagttgattgtatgaactaatggtgaatttttgttggcaggttaaatgggtgagacttttgtacaatgacttttctgcttttaccaaagaccaggaacaactaatatctatcactggaaggaaacaaaatgtttcactggattatttggaaggattgctgctaatgcaccaaggacccataaataattggagatcttctttcttccctttagccgaccatgcccgaataatttcgctagtaactaaacacagcgtcctctattgcctagaagttgccaaatattatgatggccaaaatgaaaacaatgtggacaaggtaccatctccattcatgtgcatttgccttgatgatgtttcttctattttttcttttaatgttttgatctcaccttatataataaccctttatcacactcaatcttgttatatttttaagagtttaatgataatattatgattttgttgtgaaaaaagagagtttaattgttattatataatcacaaattatcattaatatgacttttaaaataattaataatataaaaattaataaatttatcgtatttaatgagttataattaaatgatcatataaaattattttatattattaacatatagtttttttttctatttttaatatttgttttactataagttgttatattttcaatcttttttctagtataagttttaataatcaatattgtaagtaatattctcatttttcatgttgtgtaggaactccaagttttactacaaggattgagctatatccctggattttactatgaaaaagatgtctcatattttgagttcttgaatagagtccgaagtggagagttgaagctacagtcacaaggactatgggatgttcctcacccgtggcttaatttgtttataccgaaatctcaaatcatggaatttgactcgggcgtgttcaagaatatcatccttaaacgaaacatcaccacaggacctgtcttggtttaccccatgaatagaaacaagtaattgagcttaactaactaatctcaacttatgttgttatcattaggaaaaatgttaattggtacgaaaactatatataccactattttcatttaaattcatgaaagtgaaatttctctttcctaaaacaaattctttctcttaaaatgaatttttgtttttctcaatctccatcaattacttatttccttttttgaatgtttgaaaagtcattcacaacattttcttcataaaagggttattcgtaccaatttaaatagaattgccgttattatcagatgtacaattcttctcttcactcacttcttttccattaaaattgtaaaaaaaaaataaaaaaatcaggtgggacaataggatgtcagcatcaatacccgatgaggatatcttctacacagttggatttttgcattcaagtgggtttgataattggaaggcctatgatgctcaaaataaagaaattctacaattttgtaacgttgctgggatcaaggttaagcaatatcttccccactatcgcacacaagaagattgggcaaaccattttggccctaaatggaggacttttgtagaaagaaaacaccagtttgatccaagaatgattctatcacctggacaaagaatctttaacaattaaaatagctttaaaaatatatattcccccccccccccccccccccaaaaaaaaaaaaattatataatatggtgggactacccaagttagctagctggctgatcacaagtgtgcacataggacccagaattcagatgatagcctttgtacttgtttttgttaagagggtggggttaaaagctgcatgactttggcatatatgtagatcaggttacacatactttagatacgttaggttgacaaaatcatgtgtgaaataagatgcacacagctagctgtgtacctttctttctctctgtccctcaatttgtctatcactaaaaagatttctatatagtttagaacctagtgaagagaaagaaaaaaccattatattgaggatttaattttatcacgttctaatcctatacattaatattcttaaatgtgcaatgagtgtgctcggtgccttaatgattctttatctttgttaattgttatattgtagggttttgtttttgccttcctaattttgtaacaggggcacccctagcaataattgagatcctaggttaactaaggaacagcattattgtgtctaaattgagattcctagctgtatgccataataataaatcatcgtaggttgctagatagatgtgatagcgccaaatgccttccaatactataatctccattgcaagatccttcgttgtgattgtgtagaaaagattacgctgctttacaagagaatactccaagaaagcaagtgattgctccttaatataaagaatcatgcaataaacaaatggtgtcgtaatccataaagtgtatttaatatttgatgaaagagtagtgtagacatcaaacaaaataaagtttgatgcaattcgaattatagatacttgattaatctctaaattatgttgagacaatcatatttgaatttgataagactattatgaacgataaaaaatattataaataataaaaaaatttcatcaaacatttaatacaattatataccttactcaaatttgaaaacctgtacatataggaaaaaaacctttactaaaagaggttaaactcaccatacggatttttatatgtcgaagggatctttaattgtccatcggaaaacatcctaattcataaaaaaggaaagaaagtttagacatgaataattacggaccaatgaatgcaacctacgtctctcaattttaaggagaatttaggaatattatagtatatcactgaaagtacacacaagtggcaatgatgaatattttaatttaaagttttaattggattcgaaattaatcccttcttttttccagaaaaaataataatcatcgagtaatcaagacaatttcccaagtagacaacaagaatacaaaagagaatacgtgacttcgtttcaccatagaaaagaaggaatgcaataacgatgataataattataaaatgaaattgacaaaatatctaaatgcctgtagatatttctacagcgaatgataagtgtttttccattaaaaataagtttcttttgttaagaatttctaacatttttagttccaaaatataggaatgaagccaataagtaagtaagaatttctaacgtctgaaag

SEQ ID NO: 238 - DNA, 5904 bp, Artificial Sequence; identical to SEQ ID NO: 226
  Synthetic polynucleotide

SEQ ID NO: 239 - DNA, 5878 bp, Artificial Sequence
  Synthetic polynucleotide
atttagcatccctccctttgcacaatgtacaatttgggttttgaataatttttgtcacaccttcatttcgtgggactacttctctaatctatacccatcctggtgaaaaataaagggagcgagttacttacttaattaaacatacttaagtttctctctgactctctctcctctttttaattaatttatcataaacaaatatgtgtgcgagtattaaacccgtgcaaaatattagtattattgtttaattttttttccttctcatcaatcataaatatactttttaatacaaaataaaaaatagttaactcagaagatttcttcacttaatcacttcgattcaatattaaaaatcaatccacgctttgttgttttttttcccatgacttatcacgtacatttattatttattatttttctgatgttcttactataaagggaatcactatttgtcacacacaaaactataaagggaatcaaatgatcaattcttatttaaaaactctattaattaaaattacaattacaacaaaaccctaattttatcctccttataattaaacctccacattctctctctctctatcaatacatgtgtttctcaaattaaatattttccatatcctccttttatcatgcaaagtcctcttccattctatatatagcccctacctcctccacctcctttccccactacaacacacaccaacaatcaaatcaatccatccaacctagacatctctcatcttctccaaattaacaaaaatggtagctgggaaatacccttcccccacatacttcatcctcctgctcataaccataacacgtttgatctccccgcctccggaactcgcctcggtctccctcgatgacaccatcttcagcaagctccgcaacgacccagaggccctccaggggagggcctccagggactacgggaacctcgtccgcgaggttccctcggcggtcttccacccgacctcgtcgagcgacatcgcgaggctgatcaagctgtcgtacaacggttctgtccccttcaagatagcggcgagggggcaagggcactcgacgaggggccaggcgatggtacgtgatggggtggtggtggacatggccgggttcagagagagagggaatggagagggaataagggttgtgatgagtgttgttgtggaccctaataataagaatggttatggttactattatgctgatgttggaggggaacagttgtggatcgatgtgctaaacgccacgcttgagcatggacttgcacctatgtcctggactgattacttgtacttgacggtgggaggaactctctccaatgctggcatcagtggccagacattccgctatggtcctcaaatcaccactgtccgccaaatggacgtcatcactggtaagacaactttcaatttattcagttaattttatcatataattttaccaaatacttataaaccatatcagaaacttttaatttaatcaactaactcacaattagtttaatcatatacttttaatttaatccactaacttataaatttgtaacttttcagcttggaggtttgtaggttataagtctcaactttccactaacttataagttagttttagttttattgtatgtggtacttttgaaaattcaaggattttggtactataataactcgttcaactgttggcttagtatcaaaactcttggattttcaagtgtacttcaacaaccatcttaatttaattgatcagggttttaatattgtgaaaattggtcattggacaacttggaaagtgacacagcttggaaaagaaggaaagagggagatgggaagggaaaagaaagaaaataacttttaaaattagttgcgtgaaaaaattaaggttgctgaattaaattatggttcaccacgactctaattgtggcaacccaacgtgccgtggttgtggatattttcagaactttattgcaacttcggttatagtggcgtttgttcaattcattttttaatgtatcagactgtgattgcgattgaaattttataaaatctttttttttttaaacttgttcttttgattaggattaggaatttcagaaacttgattctatttcatatacttttttttaatgtaataccgaattagtggttgataaacgagtctttgtctacaaatttggtgaatgttagcaaccgctttccatctggtcccatgcttgaaaattttcttaaccatggaaattagttcacacggacagtcatagccttcaattcttgattaattgtttccttttctaaaatatggtgatactattatattattggtccaaggtcttgttttggtcaaatttttttattagaaataaacgggctgctgaattttaatttactcaagtgtttcttaaagaatatgtatgcatgcatgcaattatatattattattattatcattactgttatgtttaatcaagtttaatttggtttggttcaggaaagggagaatttgtgacttgctctcagcagacgaattcggagttgttccacgcggttctgggggcttaggacaatttggaattataacaagggcaagaatcgctcttgccccagctcccaagagggtacgtttaaaatcttcaagaattgactaggactttgtcttgttgcttcttcctccaacatctctcacatagtaacgccaatttctgcatatgttacattattaattcaaccatcaagctttagggaagcatcaaatgtccttgtcctaaatgctttatgtcatcatttttcttggcaccctttcgtttcacattgtgttagtgcatattagtcatccatgaaagacacatgaaaataaaatttgttggaaaaatataaatcatattttcataagtcttttgaaatatacagtaaccttagagaccttaagcaattaagccaataaaaagggtcgtattatcaaaccccaactaacaactattagaaaatactaacaagtataggtgcatacataaatatgtttccactagaaagtatataaagttggtgagatgattcattttgaattttagtaccttaattatttaactttatccttctatttgatgggactcatcgcataagccatacatatatacataatcatgcgttcattattgtttttcattatgagttaatgagttgattgtatgaactaatggtgaatttctcattggcaggttaaatgggtgagacttttgtacaatgacttttctgctttcaccaaagaccaggaacaactaatctcaatcactagaaggaaacaaaatattgcactggattatttggaaggattgctgctaatgcaccaaggacccataaataattggagatcttctttcttccctttagccgaccatgcccgaataatttcgctagtaactaaacacagcgtcctctattgcctagaagttgccaaatattatgatggccaaaatgaaaacaatgtggacaaggtaccgtctccattcatgtgcatttgccttcatgatgtgtcttttatttcttttcttttaattttttgtctcaccttatataataaccctttgtcacactcaatattattatatttttaaagagtttaatggttatacactatttttactttatttaattataaattatcattgatatattttttaagataattatcataaaagttaataaatttatcagttataattgaatgattgtataaaattatttaatttatattgcataatttattttctatttgtaatctttttttactataagttgttatattgtaagtaattaatattctcattttcatgattgtgtaggaactcaaagttttactacaaggactgagctatatccctggattttactatgaaaaagatgtctcgtatgttgagttcttgaatagagttcgaagtggagagttgaagctacaatcacaaggactatgggatgttcctcacccatggcttaatttgtttataccgaaatctcaaatcatggaatttgactcgggcgtgttcaagaatatcatccttaaacgaaacattaccacaggacccgtcttggtttaccccatgaatagaaacaagtaattgagcttaactaactaatctcaatttgtattgttatcattaggaaaaatgttaattggtacgaaaactatatactacactattttcattaaaattcatgaaagtgaaatttctctttcctaaaataacttctttctcttaaaatgaatttttgtttttctcaatctccatcaattacttatttccttttttgaacgtttgaaaagtcattcataacttttttttcataaaaaggtcatttcgtaccaattaaatagcattgcctttattatcatatgtacacaattcttctcttcactcacttctctctttttttttcccattaaaattgtaaaacaaataatcaggtgggacaataggatgtcagcatcaatacccgacgaggatatcttctacacagttggatttttgcattcaagtgggtttgataattggaaggcctatgatgctcaaaataaagaaattctacaattttgtaacgattctgggatcaaggttaagcaatatcttccccactaccgcacacaagaagattggacaaaccattttggccctaaatggaggacttttgtagaaagaaaacaccagtttgatccaaaaatgattctatcacctggacaaagaatctttaacaattaaactagctttaaaaaatatatataatatggtgggactacccaagttagctagctggctgatctcaagtgtacacataggacccagaattcagatgatagcctttgtacttgtttttgttaagagggtggggttaaaagctgcatgactttggcatatatgtagatcaggttacacatactttagatacgttaggttgacaaaatcatgtgtgaaagatgcacacagctagctgtgtacctttctttctctctctctctttctttctctctgtccctcaatttgtctatcactaaaaagattactatagtttagaacctagtgaagatggaaaaaaatcattatatagaggatttaattttatcacacgttctaatcatatacattaatattcttaaatgtgcaatgagtgtgttcggtgccttaatgattctttatctttgttaattgttagtatattatagggttttgtttttcccttcctaattttgtaacggccatccctactagcaataattgagatcctaggttaactaaggaagagcattattgtgtccaaattgagagtcctagctgtatgccataataataaatcatcgtaagttgctagatagatgtgataacgccaaatgccttcaaatactattattaatctccatcgcgagatccttcgttgtgattatgtagaaaagattacgctgcttttacaagagaatactccaagaaagcaagtgattgctccttaatataagaatcatacaataaacaaatggtgttgtagtccataaagtgtatttaatatttgatgaaagagtgtgtagacatcaaagtgataaaactaataaatttaagtttgatgcaattcgaagtcgtagatacttaattaatctctaaatcatattagttttaaaccatacagattttaatatgttgaatggattaatctttaattgtgcattggaaaatattataattcataaaaaaagaaataaagtttagacatgaataattacggactaatgaatgcaacctatatatactacgtctctcaattttgcggagaatttaggaatattatagtatttcactgaaaggacacacaagtggcaatgatgaatattttaattt

SEQ ID NO: 240 - DNA, 9720 bp, Artificial Sequence
  Synthetic polynucleotide
ttaaaaatatttaaagacttaattaaaaattattaaatatttcagagatctataaattaatttaacataaatgaaagtgttatcaaatatgtctagctaattgaaaaaaaaaaacttaaataaaaatttctttttacctgtcttattaggtgactaaggatataattgataaacaaaagtaattaattaattataagatctttaactttataaaaaataaataaaaaaatcttttaaaaaaaattcgacaattaaaaagaaattaacagagggagtaacaattttttacattaaaaaataaatttaaaatttgagtttaacggtcgtattatcatttagtgataaattatcgatataaattttaagataattattataaaaattaataaatttattatgataatttataattaaatcaaaatataaaattatttaacaccacgtgcataataatctaattcacaaaaaaaagaggtaatttatatagtctcttttattaccttatttttctgagtagtaataaatagacaccaagtgttaataataaagtttatcctttctcctcctatccgtctctttatttatttttcattacaaactttatcaaatctatcaatttctctctcttctatctttctctttgttctatccatacaacttaaaaatgtggttgtagtctaaaattttgcctctaattactgtctaccgcggtgtacttgacctgtacaattacctttcagatgctattataactagagaaatttagctcaagacttaaaaacaatggaccaagagatgtgctgtttccacaatgaggcacgtgtctcctcggtccagtcacgtgaagatccacgtgcctttactctgagcttgagccttagtagtttttcgtggttctctccctgtcctataaatttgagagcctgtatcttacatcctagacacacagtagtgactagctcattcattacaattcatcaccccagccaccaacccttttttcatgccaaaccacgaatttgcttctaattttcatgccaaaccctttcttctttcttttgagagagacgcaatccgctcctctatcttactggctagatcaattcctttctattaatttgcttctttctcaatttgtacatgccttcgatcttatagacatacatatatctcctaaactgcacatagagatttaaaaaaaaagaacaagttacaagtagaatttttttggcaagaatcgaagaaagtgagtgagagaaaagaatcttcatctttctgcatgttgcgtacagaatctttaaagccaaatcctgctcacgttaacccacgacgctgttccaagattttgttctcttctctggagcttcccaacattcttcctttccctcatccaccacccccactacccaataactcatcatcatcgtacgccacacacatgacatgcatgtatcttcattaattccttagcgaaaccacacgtactctagcttgtggggtagtttttaattattagttattcttatcttgttcaattcatggctgtcaacaacacttgttctgttaacattcgccatatgccgtttaatagtaactgtgggattaacggtggtcccggagctgctcgatgtgggactccagggtcgtctcagcgtggacacgttggaactggaggcggcttcggtggatttcgggaggctgagtcgaggggagccttcggaggtagtgcaccctgccacggcggaggatgtggctagggtggtgaaggcggcgttcgagtctccgttcgccgtgtcagcgagggggcacgggcattcgataaacgggcaagccatgataaaagagaagaaaggagtggtgattgaaatgggaaaaagtgatagtggtgaggatggtagtagtattagagtgagtgagaaaggaatgtatgtggacgtgtggggtgggaagttgtggatagatgttttgagtgcaacattggagtatgggctggctcccatgtcttggaccgattacttgtatttgtctgtgggtggaaccctatccaacgctggaattagtggacaaaccttcaatcacggtcctcagatcaccaatgtttatgagctcgatgtcgttacaggtaatttaatatataatataatttgcattcacttttaactaatcacaaatatcattattggtatacttttttaaggtacaatttttgcattcacggttaatttttacaataatagtactatgtttaacatttgacaccttcaaagagaaaaaaaggagttctaccattataaatgattctaaagatggatttatattttcgaaaattaatgtttattatatacatttttaaataatttaaatttgttggtgttattgttgccaaatttgattgttttaccgtaagaaatgatgcttgtgcatgctaataactagttgttcttgttccccaagaggaaaagttaattttcactaattaaacagaggtgtcccactggtttgtcatggtgctgagtacaaacgaatctcgtttatctttagcgtggttaatctcgttgatatcataatgtgtactggtgtgtaacaggaaagggtgagctggtgacatgttcagaagatcgtaactcggagttgttccatgctgttctaggtggtcttggacaatttggaatcatcacaagggctagaattgctctcgaaccagctcctcacagagtgtgtatctctcccacgtactttatctttctttgtctctttttcttactcacacatatacagtacccaattccctctttcctaattgtatgactctcttttcgtactagctcgtgacctcgcacataatatgctaacatttcatgtaataattgaagataaagttataaaaatgaataatattatctgttttcataatgcatacatatacttcatttttattttttagaaacaactcaatgtaaataaaatttaaagtgtaaatattatttctttttttccatcatggaaaaaaaaagtcggttgaacatgatttccatgagatgataggaggggcacacacgatgcgtcttttcttggaaatctttcttcacatcagcgacaaaacctaaaaaaagggtcgttttcgaagggatggtttgggtactcttctaacaatataaagctggaataattatcgtttgcgtgtcgcctgcctgggacattctctgttttaattcatttctcttaacgaactaatatcactatcgattaagggaactgatatcaatgagctataacaatagaatattctcgtctaattaatattattagggtttaatttctatttactgtaaattaatattactataagaaattttacattttcaatcaatcatacatcatcgtggtggtataacttttaaagtgataattactataaaaaggaacatatacttctcatacatgtttatttataattgagagattagataaaatttgtttacacgttcaatagatatattattttctccaataaaattatattagagttagatatatgataaatatttaagtgcaggttcggtggatacgagtactgtattcgaattttgcaaggttttgtaaggaccaggagtatctgatatctctgcatgggaaagcagcaagggagagattcgactatgtggagggtttcgtgatagttgatgaagggctgatcaataattggaggtcttcgttcttttcagctagtaacccagttaaaatcacttccctcaacgctgacggaggtgttttgtactgcttggagattaccaaaaattacgaccaaggaaacgcagattctgttgatgaggtacgtacacacccaatcccacgtacattttctcttctttgtcagtgccttcacttatatataatattattgactgttcatacacttagtgcgctgtcacaataaaatatattcatttaactttcattagtttaattatgtgaagttaccttatttcgtttactaataacgtgttcatatcttatttattgcgtactccacttcgtgtacacattataattgtcattttttatcattttacaccaagaaaataataaataaataagactaataataattttataaaattaatattttattattattaattcatttataaattttgttatttataattaatatgataagcgatataattaaaaaataataattaatgttacatttaaaaattaaaatgataattattttgaaatatttttttctcttgtatgacagttactttaatgttgaagaaaatttagatagaattaaacaaaatgattggacaaaataattaatatattaaagttaaaattaaattatttcagtattatttaagtttgatatttaataaaaataattttttattcgattttacttattttttgattgaattctagattagttgagattcaatttttttaatgagttggagggataggaaaaaaatagttagatagaattaattcttgaaagagtgaaaaaaaaatacattgaagcttttttttattgaaacgtgtaagaatcgagattctaacaaaaaataaaacagggcttaagtagttaagtttttaccaaaatcactccacctagctagctaatgttgcctgtttaatttactttatgtatttttatttttttttcggttacatccatttgtttaaaataattgtttctcaaatatgctacttgatgtccatgttgttcaaattctaaactctagaaaagacatgaaatataagtatgtgtcagaataattaattaagtcttcgggctttttcgtccagtttttgttagttggtcaacacatttatgcttcagagattctataggatttatagggagcaaaatataaaattaacaggcaaacataaaaggacaaaattaatggcgttgatttgaacatcaattaaaaagtaacattgatattcataacaaattaacagacaaatgtgaaagaacaaaaatagcattattcaataccagttgtttttaccacattaaatttgaacgtttagttttgagtcatctgtcctttctctctttatcgttctacccttgagaagatcaacggaagaaatatgtcaattattctgacgaatactctcatatgattatgcgattaatgtcaagattttcttcgttcacaaattcatgcttactttaataattcagtatctgtctgttttatgtttgaagtctgatttaatattgttaatggtatctttaagtaattggtcaaacaattcaattaacaagaaaaatgatatacgctgtccagaggtaatcacattttatttaatttcataatttattgaattaaaaccttggttcttccttcatcgctgtcctcgtatatgattattctctgtacccaaacattgaccagtctctagttgtagaacagaatgcaataaaacatacaaaagaaaacatgtggaagatcttgtgcaatctatcatctcgattcaatcgcaagattgaatgcaacctttacaatagttaattttcactgtttaaaaatgccggcagtccaccagaatattctctcacttgtttttaacttctcttaattaattcttgtcaaagctatatataactgctcacaatagtgggtctcatatcccgacaaaagcaccggctaccttagctagcagctttcctttttcatgcataactatttaatttaagacctagagaggaaaaaagagataaatatagtttaaataagtgatatgatgttatagaaaaataaacataaaatatgttactagagtatttcatttatatatatatatatatactccacttttataaatatatttaaataaatagttatttgtattttgatctactagaatgacgtatgagagatttttttttaatctttaatttttgttattaagtacttatgtttttaaagttaaacaaagttagtctttctattaatattctttacaaaacgtcaaaacctttaagttcattttctgtttaaaatatttataaattatatctattacattatttaaatactttttattcgaagcataccaaccgaaattaaacatcaaaagacattttcttagatttctctttgtacgtttttatggtatgcaggaaatacaagctctattgaaaaagttaaattttataccaacatcggttttcacaacggacttgccttacgtggattttctggatcgtgtacataaggcagagctgaagcttagatccaagggtttatgggatgtacctcatccgtggctcaacctttttgttccaaaatcaaggataggggacttcgacaagggtgtgttcaagggcattcttggaaataagacaagtggacctatcctcatataccctatgaacaaaaacaagtaagtttataaatatatatttccgcatgcatatccatttgttatactatcatattcatccatgtcctagtcatatatatgtagaataaaaccactgcatgtttgcaggcatgcacatatctcctcatatataaaccacatgtctgctgctgatagcctcatatcgactgtcagtgtttagggaagaagaaaagaaaagaaaaagttcaaatgagtaatgaaatagagtatgaagttttgtgatcatatatgaaagagaaaaacctgcaacataatatatattttctacaacgaatattcccaataattatggaactagatgaaaatgtgtgaagattctccacgattgatggacagatagtactattgtcggaattaatggattagggaataaacagaatctagacgtttacattaatcctaataatagatggctgaatctgtttgtttctactttcattgtgtgtattaattaatccaggtcctcgataattcttgaattaaagaagattctgtttgataaatttgtctacacttaattaaacactgacaaaaaaaactaaaatgaattaatttatttttataaattaaaatttacatctcaataaaatattagctatagataacttaaattaagaatgcttaatccaattaagtgaaaataaaaaatatgaaaagaacaagaagcacagtgaggtgcatgtagtggaaagacatggaagacacacgagggttgtattgtagccaacatagcagatgaaaatctgcatcaaagccagctaggaagtgccacgtttattatttcttgaccagaagcaaacaaaatggatggccatgatcatccaactggagagattctggtgtcagaagatcttccatagggacccactcctcgaatggtagggatgtctcctctccactcctcaccttttatactaacctagttccatagacaccgccatatgcatcaacttccaggtcaatatcaatataatatgcacaaataaacaaataaaaaccataataattgcacttagttatgttttttttttttcattttaaaaataccaaaaattaatgataatgatatcacaaataaaaataaaaatgcatgtttgttagagggtatataatataagaaagacaacgcttgtccaaagcatttatatatagagagagagaataagataaaaaattaaatgaattctatgtatcttgccataggtttctgactgataagtcgatggattattaatgtttttgaattagaccacgaattagaaatacttaaaaaagttctattgttatttcaacagagtagtagtaagtaaagtaaatggtttcaagtgtgcagtatagatgaatagaaaaattcaaaagatgattttgggcgatggtgatgtgtaggtgggaccagcgaagctcggtggtgacaccagaagaggatgtgttttacctggtggcatttctaagatcggcattggatactgagacgctggagtacctgactaatcagaaccgtcaaattctgaaattctgccatgatatagagatcaaggtaaaacaatacctgccccattacactacgcagcaggagtggatggaccactttggtgataagtggacccagttcaatgctaggaagatgcaattcgatccccgccgaatcttagccacaggccagcaaatttttcagtttcatccctcactcaccctcaatatgtagaacaaacatgcaaaatggataaataatcttgggttcatgttgagtagcaagtgctgtattattgtaattaggaaatacaaggaggatcatggcaaaaaaagaattagaaggatgtagttgtagtgcactagtgaaggatcaagagttgttgaggtgttgttatctgagggtaataaaattgatgatggagttggatttttgttatgtaatggggtcttgtagcaaattaagtaaggaacccaataaggattaggcccaaagaatataaggagtggtggggcccgctttggaggaggaaaagggcaatgcgcaagtgcacatgagcaccgcccgtctggtttggctgtctcgtttttcaatatagatatcttttattacccatccaaattcctcgtacatataattcttctagatgtattagtctgtatgtttatttcaaatggaaacatttaatcagtgactccttataaaacataatcaacggcatttatgaataaagttaataagttaagagggaaaggaaagaggagaggaaaatgttcaaatgaatcaaatttctcccattaacatttttaataaaattaatatttatcgataaaaaaaatatcaacaagttaagaaaataataataatagacatgtattgctaatataaaagtttccgtacacaattaattaattagaaactatcttaaatatcacttttaacaaagtaataatataaatcaataacataactttttttttatcactataatattaatgtgacatatttgtctattttgagaggttggaaacttggagacgagctctagaaacacatgactttcgcctaaacagaagcaaatcggagtatatggaatgtaagttcaacaaaagtaagagggtatctaactcagatgtgaaaatagaagaccatattatccctcaagtcacacagtttaaatatcttgggtctgtaatacaggatgatggagaaattgaaggggatgtgaatcatcgcattcaagcaggatggatgaaatggagaaaagcatcaggggtgttatgtgatgcaaaggtaccgatcaagctaaagggaaagttttatcggactgcggtaagaccggcgattttgtacggaacagaatgttgggcggtcaagagccaacatgagactaaagtaggtgtagcggagatgaggatgttgcggtggatgtgtggtaagactcgacaggataaaattagaaacggagctattagagagagggttggagtagcgcctattgtagagaagatggtggaaaatagacttaggtgatttgggcatgtagagagaagaccggtagactctgtagtgaggagagtagaccagatggagagaaggcaaacaattcgagacagaggaagacccaaaaaaactataagagaagttatcaagaaggatttcgaacttaatgatttggatagaagtatggtacttgatagaacattatggcagaagttgatccatgtagccgaccccacctagtgggataaggtgttgttgttgttgttgtatttgtctattttattaatgattaatttctgttggagaacttaatt

SEQ ID NO: 241 - DNA, 9717 bp, Artificial Sequence
  Synthetic polynucleotide
ttaaaaatatttaaagacttaattaaaaattattaaatatttcagagatctataaattaatttaacataaatgaaagtgttatcaaatatgtctagctaattgaaaaaaaaaaacttaaataaaaatttctttttacctgtcttattaggtgactaaggatataattgataaacaaaagtaattaattaattataagatctttaactttataaaaaataaataaaaaaatcttttaaaaaaaattcgacaattaaaaagaaattaacagagggagtaacaattttttacattaaaaaataaatttaaaatttgagtttaacggtcgtattatcatttagtgataaattatcgatataaattttaagataattattataaaaattaataaatttattatgataatttataattaaatcaaaatataaaattatttaacaccacgtgcataataatctaattcacaaaaaaaagaggtaatttatatagtctcttttattaccttatttttctgagtagtaataaatagacaccaagtgttaataataaagtttatcctttctcctcctatccgtctctttatttatttttcattacaaactttatcaaatctatcaatttctctctcttctatctttctctttgttctatccatacaacttaaaaatgtggttgtagtctaaaattttgcctctaattactgtctaccgcggtgtacttgacctgtacaattacctttcagatgctattataactagagaaatttagctcaagacttaaaaacaatggaccaagagatgtgctgtttccacaatgaggcacgtgtctcctcggtccagtcacgtgaagatccacgtgcctttactctgagcttgagccttagtagtttttcgtggttctctccctgtcctataaatttgagagcctgtatcttacatcctagacacacagtagtgactagctcattcattacaattcatcaccccagccaccaacccttttttcatgccaaaccacgaatttgcttctaattttcatgccaaaccctttcttctttcttttgagagagacgcaatccgctcctctatcttactggctagatcaattcctttctattaatttgcttctttctcaatttgtacatgccttcgatcttatagacatacatatatctcctaaactgcacatagagatttaaaaaaaaagaacaagttacaagtagaatttttttggcaagaatcgaagaaagtgagtgagagaaaagaatcttcatctttctgcatgttgcgtacagaatctttaaagccaaatcctgctcacgttaacccacgacgctgttccaagattttgttctcttctctggagcttcccaacattcttcctttccctcatccaccacccccactacccaataactcatcatcatcgtacgccacacacatgacatgcatgtatcttcattaattccttagcgaaaccacacgtactctagcttgtggggtagtttttaattattagttattcttatcttgttcaattcatggctgtcaacaattgttctgttaacattcgccatatgccgtttaatagtaactgtgggattaacggtggtcccggagctgctcgatgtgggactccagggtcgtctcagcgtggacacgttggaactggaggcggcttcggtggatttcgggaggctgagtcgaggggagccttcggaggtagtgcaccctgccacggcggaggatgtggctagggtggtgaaggcggcgttcgagtctccgttcgccgtgtcagcgagggggcacgggcattcgataaacgggcaagccatgataaaagagaagaaaggagtggtgattgaaatgggaaaaagtgatagtggtgaggatggtagtagtattagagtgagtgagaaaggaatgtatgtggacgtgtggggtgggaagttgtggatagatgttttgagtgcaacattggagtatgggctggctcccatgtcttggaccgattacttgtatttgtctgtgggtggaaccctatccaacgctggaattagtggacaaaccttcaatcacggtcctcagatcaccaatgtttatgagctcgatgtcgttacaggtaatttaatatataatataatttgcattcacttttaactaatcacaaatatcattattggtatacttttttaaggtacaatttttgcattcacggttaatttttacaataatagtactatgtttaacatttgacaccttcaaagagaaaaaaaggagttctaccattataaatgattctaaagatggatttatattttcgaaaattaatgtttattatatacatttttaaataatttaaatttgttggtgttattgttgccaaatttgattgttttaccgtaagaaatgatgcttgtgcatgctaataactagttgttcttgttccccaagaggaaaagttaattttcactaattaaacagaggtgtcccactggtttgtcatggtgctgagtacaaacgaatctcgtttatctttagcgtggttaatctcgttgatatcataatgtgtactggtgtgtaacaggaaagggtgagctggtgacatgttcagaagatcgtaactcggagttgttccatgctgttctaggtggtcttggacaatttggaatcatcacaagggctagaattgctctcgaaccagctcctcacagagtgtgtatctctcccacgtactttatctttctttgtctctttttcttactcacacatatacagtacccaattccctctttcctaattgtatgactctcttttcgtactagctcgtgacctcgcacataatatgctaacatttcatgtaataattgaagataaagttataaaaatgaataatattatctgttttcataatgcatacatatacttcatttttattttttagaaacaactcaatgtaaataaaatttaaagtgtaaatattatttctttttttccatcatggaaaaaaaaagtcggttgaacatgatttccatgagatgataggaggggcacacacgatgcgtcttttcttggaaatctttcttcacatcagcgacaaaacctaaaaaaagggtcgttttcgaagggatggtttgggtactcttctaacaatataaagctggaataattatcgtttgcgtgtcgcctgcctgggacattctctgttttaattcatttctcttaacgaactaatatcactatcgattaagggaactgatatcaatgagctataacaatagaatattctcgtctaattaatattattagggtttaatttctatttactgtaaattaatattactataagaaattttacattttcaatcaatcatacatcatcgtggtggtataacttttaaagtgataattactataaaaaggaacatatacttctcatacatgtttatttataattgagagattagataaaatttgtttacacgttcaatagatatattattttctccaataaaattatattagagttagatatatgataaatatttaagtgcaggttcggtggatacgagtactgtattcgaattttgcaaggttttgtaaggaccaggagtatctgatatctctgcatgggaaagcagcaagggagagattcgactatgtggagggtttcgtgatagttgatgaagggctgatcaataattggaggtcttcgttcttttcagctagtaacccagttaaaatcacttccctcaacgctgacggaggtgttttgtactgcttggagattaccaaaaattacgaccaaggaaacgcagattctgttgatgaggtacgtacacacccaatcccacgtacattttctcttctttgtcagtgccttcacttatatataatattattgactgttcatacacttagtgcgctgtcacaataaaatatattcatttaactttcattagtttaattatgtgaagttaccttatttcgtttactaataacgtgttcatatcttatttattgcgtactccacttcgtgtacacattataattgtcattttttatcattttacaccaagaaaataataaataaataagactaataataattttataaaattaatattttattattattaattcatttataaattttgttatttataattaatatgataagcgatataattaaaaaataataattaatgttacatttaaaaattaaaatgataattattttgaaatatttttttctcttgtatgacagttactttaatgttgaagaaaatttagatagaattaaacaaaatgattggacaaaataattaatatattaaagttaaaattaaattatttcagtattatttaagtttgatatttaataaaaataattttttattcgattttacttattttttgattgaattctagattagttgagattcaatttttttaatgagttggagggataggaaaaaaatagttagatagaattaattcttgaaagagtgaaaaaaaaatacattgaagcttttttttattgaaacgtgtaagaatcgagattctaacaaaaaataaaacagggcttaagtagttaagtttttaccaaaatcactccacctagctagctaatgttgcctgtttaatttactttatgtatttttatttttttttcggttacatccatttgtttaaaataattgtttctcaaatatgctacttgatgtccatgttgttcaaattctaaactctagaaaagacatgaaatataagtatgtgtcagaataattaattaagtcttcgggctttttcgtccagtttttgttagttggtcaacacatttatgcttcagagattctataggatttatagggagcaaaatataaaattaacaggcaaacataaaaggacaaaattaatggcgttgatttgaacatcaattaaaaagtaacattgatattcataacaaattaacagacaaatgtgaaagaacaaaaatagcattattcaataccagttgtttttaccacattaaatttgaacgtttagttttgagtcatctgtcctttctctctttatcgttctacccttgagaagatcaacggaagaaatatgtcaattattctgacgaatactctcatatgattatgcgattaatgtcaagattttcttcgttcacaaattcatgcttactttaataattcagtatctgtctgttttatgtttgaagtctgatttaatattgttaatggtatctttaagtaattggtcaaacaattcaattaacaagaaaaatgatatacgctgtccagaggtaatcacattttatttaatttcataatttattgaattaaaaccttggttcttccttcatcgctgtcctcgtatatgattattctctgtacccaaacattgaccagtctctagttgtagaacagaatgcaataaaacatacaaaagaaaacatgtggaagatcttgtgcaatctatcatctcgattcaatcgcaagattgaatgcaacctttacaatagttaattttcactgtttaaaaatgccggcagtccaccagaatattctctcacttgtttttaacttctcttaattaattcttgtcaaagctatatataactgctcacaatagtgggtctcatatcccgacaaaagcaccggctaccttagctagcagctttcctttttcatgcataactatttaatttaagacctagagaggaaaaaagagataaatatagtttaaataagtgatatgatgttatagaaaaataaacataaaatatgttactagagtatttcatttatatatatatatatatactccacttttataaatatatttaaataaatagttatttgtattttgatctactagaatgacgtatgagagatttttttttaatctttaatttttgttattaagtacttatgtttttaaagttaaacaaagttagtctttctattaatattctttacaaaacgtcaaaacctttaagttcattttctgtttaaaatatttataaattatatctattacattatttaaatactttttattcgaagcataccaaccgaaattaaacatcaaaagacattttcttagatttctctttgtacgtttttatggtatgcaggaaatacaagctctattgaaaaagttaaattttataccaacatcggttttcacaacggacttgccttacgtggattttctggatcgtgtacataaggcagagctgaagcttagatccaagggtttatgggatgtacctcatccgtggctcaacctttttgttccaaaatcaaggataggggacttcgacaagggtgtgttcaagggcattcttggaaataagacaagtggacctatcctcatataccctatgaacaaaaacaagtaagtttataaatatatatttccgcatgcatatccatttgttatactatcatattcatccatgtcctagtcatatatatgtagaataaaaccactgcatgtttgcaggcatgcacatatctcctcatatataaaccacatgtctgctgctgatagcctcatatcgactgtcagtgtttagggaagaagaaaagaaaagaaaaagttcaaatgagtaatgaaatagagtatgaagttttgtgatcatatatgaaagagaaaaacctgcaacataatatatattttctacaacgaatattcccaataattatggaactagatgaaaatgtgtgaagattctccacgattgatggacagatagtactattgtcggaattaatggattagggaataaacagaatctagacgtttacattaatcctaataatagatggctgaatctgtttgtttctactttcattgtgtgtattaattaatccaggtcctcgataattcttgaattaaagaagattctgtttgataaatttgtctacacttaattaaacactgacaaaaaaaactaaaatgaattaatttatttttataaattaaaatttacatctcaataaaatattagctatagataacttaaattaagaatgcttaatccaattaagtgaaaataaaaaatatgaaaagaacaagaagcacagtgaggtgcatgtagtggaaagacatggaagacacacgagggttgtattgtagccaacatagcagatgaaaatctgcatcaaagccagctaggaagtgccacgtttattatttcttgaccagaagcaaacaaaatggatggccatgatcatccaactggagagattctggtgtcagaagatcttccatagggacccactcctcgaatggtagggatgtctcctctccactcctcaccttttatactaacctagttccatagacaccgccatatgcatcaacttccaggtcaatatcaatataatatgcacaaataaacaaataaaaaccataataattgcacttagttatgttttttttttttcattttaaaaataccaaaaattaatgataatgatatcacaaataaaaataaaaatgcatgtttgttagagggtatataatataagaaagacaacgcttgtccaaagcatttatatatagagagagagaataagataaaaaattaaatgaattctatgtatcttgccataggtttctgactgataagtcgatggattattaatgtttttgaattagaccacgaattagaaatacttaaaaaagttctattgttatttcaacagagtagtagtaagtaaagtaaatggtttcaagtgtgcagtatagatgaatagaaaaattcaaaagatgattttgggcgatggtgatgtgtaggtgggaccagcgaagctcggtggtgacaccagaagaggatgtgttttacctggtggcatttctaagatcggcattggatactgagacgctggagtacctgactaatcagaaccgtcaaattctgaaattctgccatgatatagagatcaaggtaaaacaatacctgccccattacactacgcagcaggagtggatggaccactttggtgataagtggacccagttcaatgctaggaagatgcaattcgatccccgccgaatcttagccacaggccagcaaatttttcagtttcatccctcactcaccctcaatatgtagaacaaacatgcaaaatggataaataatcttgggttcatgttgagtagcaagtgctgtattattgtaattaggaaatacaaggaggatcatggcaaaaaaagaattagaaggatgtagttgtagtgcactagtgaaggatcaagagttgttgaggtgttgttatctgagggtaataaaattgatgatggagttggatttttgttatgtaatggggtcttgtagcaaattaagtaaggaacccaataaggattaggcccaaagaatataaggagtggtggggcccgctttggaggaggaaaagggcaatgcgcaagtgcacatgagcaccgcccgtctggtttggctgtctcgtttttcaatatagatatcttttattacccatccaaattcctcgtacatataattcttctagatgtattagtctgtatgtttatttcaaatggaaacatttaatcagtgactccttataaaacataatcaacggcatttatgaataaagttaataagttaagagggaaaggaaagaggagaggaaaatgttcaaatgaatcaaatttctcccattaacatttttaataaaattaatatttatcgataaaaaaaatatcaacaagttaagaaaataataataatagacatgtattgctaatataaaagtttccgtacacaattaattaattagaaactatcttaaatatcacttttaacaaagtaataatataaatcaataacataactttttttttatcactataatattaatgtgacatatttgtctattttgagaggttggaaacttggagacgagctctagaaacacatgactttcgcctaaacagaagcaaatcggagtatatggaatgtaagttcaacaaaagtaagagggtatctaactcagatgtgaaaatagaagaccatattatccctcaagtcacacagtttaaatatcttgggtctgtaatacaggatgatggagaaattgaaggggatgtgaatcatcgcattcaagcaggatggatgaaatggagaaaagcatcaggggtgttatgtgatgcaaaggtaccgatcaagctaaagggaaagttttatcggactgcggtaagaccggcgattttgtacggaacagaatgttgggcggtcaagagccaacatgagactaaagtaggtgtagcggagatgaggatgttgcggtggatgtgtggtaagactcgacaggataaaattagaaacggagctattagagagagggttggagtagcgcctattgtagagaagatggtggaaaatagacttaggtgatttgggcatgtagagagaagaccggtagactctgtagtgaggagagtagaccagatggagagaaggcaaacaattcgagacagaggaagacccaaaaaaactataagagaagttatcaagaaggatttcgaacttaatgatttggatagaagtatggtacttgatagaacattatggcagaagttgatccatgtagccgaccccacctagtgggataaggtgttgttgttgttgttgtatttgtctattttattaatgattaatttctgttggagaacttaatt

SEQ ID NO: 242 - DNA, 5741 bp, Artificial Sequence
  Synthetic polynucleotide
ataaatggtagaaatctgtgggttcaaatgttcaattgctggggatcttcgtgatcatgatgattcatacacaatctctagaaacacgtacgcaaatattaattaatcaatttcctttttatagtctcctcacaattcacatgaaacttcatactctattatccgattccatttccatcgtatctttgaatttgacatttgtttgcccaacatgtaattaactttcccttctcatcttaaagatgtaacatgatatatattataacttgtaattaacccaatatttttaactctctatttttacactcatctgacatgtatttttatttttcatttttttttcttatcacatcacctcttacgtgtacaatttttctctttttcttatttctgtcttccataatagtaattaatattcatcggtccgatatgtatacagcccaaaaaagtgtgtaaaatcatttttgtatttctaaccctctctttctcatgcaagctagcttcttctttctatttatagcccttctcccttcacccaccaacacaccacaactccaaactttttcctcttgttctcttcttcttcaacacaactagtcataatccagctcatctctctctccctctctctttgttctctctttctctttctccaaaatggctctaaactacccttttttaacctacttcatactactgctagatattcactgtgggaaaaactgagcaatggaaagctccgattctaccagagcttgacattgataacatatcccacaaactccatgatgaccctgaaaggcttcaagggactatggccatttaacgcatgaattcccattagctgtgtttcgtccatcttctatagatgacatagtcaccttgataaaatcttcgtacaatagctttgccccttttgacatagctgcgaggggccaaggccactccactcatggacaagccatggctcgtgatgggattgtggtggacatggccagcctaagaaaacaaagaaatggggttgcgattagtgtctctaaggaccctttgatgggtcactatgctgatgttggaggggaacaactctggattgatgtgctacatgccacacttgaatatggacttgcaccagtttcttggactgattatttgtacttgaccgtgggagggacactttctaatgctggaatcagtggccagagcttccgttatggacctcaaatcagcaacgttcatgaaatggatgtcatcactggtatggagttagttgttttttttaatcaataaatgttaatattattagcttgttagttttttttgaaaaaattgaattaactttcgtttcctcttttctttctttttttaaccacacaattaatctaataactactggtattaagttagtttattttccatttttcatatataagttaggatttctaattaaaattgacatttcgtaccaccactacaaaaaaataatgtatcagtggcacaaaaaaatatattggcatcacttgtttttttagtcattaatattttgtagcatcacaaaaaatatggtgacaagttttctaaaaattacaaattaactgattcgtcagtgatgttaatgattttttagtgcgtcttggcaactaatgttttcatcttatataaaattagaaacaatagcggcaacagcacctgacattgtgtttgtgttttgcgtgtttctatcgcctaatttttgttgagaacgtgttcgtgaaacttggaaaaagagaaaattgaaattttcttgagatatctaccacttaagaaaaacaaatggctgtttccgttttgtctcttatgacatgacatggtacgtcatagatgaagttctgctaaatatatttgatatgatttcttgaacacgttttatatattcccacttcccagttagtgtggttgttgaatctaattaaaacaggaatagtctttgtctacaatatgggtgagcgatgcaaactttccaagggtttagaagttagaactatataggtccacggtcataattttatattcttgattaactttatgttggttaagtcgttcatatttggtcaattcattcatatgagaaaatactgaaatacaaacatggaaaaatgttaattactcttataattggcgcatgcatgcatctaaattatatgattttaataaatagtttttgtcatctacttgatttcaggaaaaggagagttcgtaacatgctcttcacagaagaacttggagttattccacgcggttcttggaggcttgggacaatttggagttatagcaagggcgagaattgctcttgagccagcacccaaaagggtacgtttatagagaattgactagaattttgtcttgtagcttttcctccaccaattcatatagtgacacctaatcgaattgtcatttttttttacggtgaattgtcattttgtaaatctaccaagtggtagttggcacccatatatgtatgaactatagtaccatacatttcattttatgttggtgtgttagtcatccatgatgaacacatacacaaatgaaaataggacgagttatacgtacgtaagggtttgaatcactgaatgtggatttttgaagttgaaagcatattaatcttggtttgaaaaagaaaaaaaaaatcggaagtccctcttgaagttatcatgactcttatattaagccaatagaattagaaaaactataattatgaatgatcatgttaattctttcagtgacttaaaatcttatctacaaaaagtacccttttgaaaaagaccttcacttaagtccatgcatacagtactaatcttacatacttgagagttgagacttgaagcatgaggagatttgaagtctggagaaacaagccaccacatattaattactaccgtattcttatctttatttatccttccaattttgatgggactggttgcacatacattcatacatactaacatacataaatacgtctctctctcatgtatttcattttattatattctatttcgttagtaagtttactagtataagacattattaatggtgaatttttgttggcatgcaggttaagtgggtcagactactttatagtgacttttctgcttttaccaaagaccaggaacgattaatctcaatcaatggaaggaaacaaaagaacgcattggattttctggaagggatgctgctaatgaaccaaggccccataaataattggagatcctctttcttccctctatctgaccatcccagaatagcttctttaataactgaacatagcatcctctactgtcttgaagtggctaaatattatgacgaacaaaccgagttaaatgtggacaaggtaacctcgtctagtcatatctattatatatagttagatcttgtcacatttctttgtttaaaaaataaaataaaaggcacaatcccaaaaagtcaaaagcaaatgcctagatattgtgtgttttcttggatattaattattacaccttaataacccataataatttttttatttttctttgtctctgtaggaaattgaagttttgctccaaggactagcctatatccctggatttaattatgagaaaaatgtctcgtacgttgagttcttgaatagggtccgaagtggagagttgaaacttcagtcacaaggactgtgggaagttcctcacccgtggcttaatttgtttataccaaaatctcaaatcttggattttaattcaggagtattcaaagatatagttcttaaaagaaacatctcctctggaccagtcttggtttatcccatgaatagaaacaagtaagccttgaatgcatgaatcacaatctagtgtcattataattcaggagtgtgtgatgcaatcttttaattttctgaccattcaactcaatatcaattttatttcttttttcaattaaaatgcaaaagagaataataattaataatatgaaatttaattccaggtgggacgataggatgtcagcatctataccagacgaggatgttttctacacagttgggtttttgcactcaagtgggtttgatacttggaaggcatatgatgctcaaaacagagaaattttggagttctgtagagatgctggcatcatggtcaagcaatatcttcccaaccacagcacacaagaagattggacaaaccattttggtgctaaatggatgaaattcttagaaagaaaacatcagtttgatccaagaatgattctatcacctgggcaaaaaatcttccacaaaaaattacagccagtgttttaaatattttccctaataaaaaaagtaaaaatgttttgtggtgggactacctcaattagatggctagctagggacaggtgtacatacagtgtgaccaagaccaagatggcttttgtatgctaaagtttgcattgctagctagagaaattaataaggtggggcattaaaggctgcatgagtacttttggcacctattatgctacatattaccttagatacgttaggttgacaaagtcgtactggtaggtacaagaagcacagttgtctctcacactgtctgtcacccaacttgctatatagtgtgtggagaaattcggatcatattgaagatgctgtgagttatagtcctccaatattaaatgtttaacgattctgtctttctcttatataattttgttttgcattatattactttcgcactggtgcaaacatatatatcaatgattataattaatttatacaatgacgagtataattgtacccaagttgcatgccataatatttgtcaaaaacaaaaagttgtatgccataatcaatccaggttgctagataataagatagatatgaatatgataacataaaatgctattaaagcaacaaataaacaataacacatagtccttatagggttcataattgatcgatgaacctagctagacgttgattttaggttaatttccagcgaggataaaatttattatataaagaaataactaaccaacacaaaataataaaaaattaaaaaaaaacgaagaaacttattttagagatataatttgttttagtatttgattgtaatttgagagattagctaggctctcaccaagtgagatctagagtatattcttaagaaaatatttataataaagaacccttaaacattttgcaaaacaaagggtggaattaatattaacaacaataattataatatcttgaaaattttatgaaaataatatatatatatatatatatatagagagagagagagagagagagagaaaattctcacaaacaatttttatctgttatttcaaattggtgtatgactccttagtccttagttcatttgtttgcacccagtcctgtcttaggtagttgattttatagttaggtaaattaatttctcgcactcttcgcttgattgtcatttatgggttgaactgttgaagtgattttatattttttaataaatttcacctgcaaaaaaactcaccattagcatacgccccccccccccccccccccccctctcccaaaaaaaaaaaaaaaacgaaagaagattaattagaaagaataaggtcgtgaaatgatgttacaaataaggcatatcagaatcagacgcaagggaagaataaaaacgttacaacaattcgcgcacaatgcaccccaaaaaaaaaatgacaggcacacataccttaaggaagaagaatcaacgctttca

SEQ ID NO: 243 - DNA, 5751 bp, Artificial Sequence
  Synthetic polynucleotide
ataaatggtagaaatctgtgggttcaaatgttcaattgctggggatcttcgtgatcatgatgattcatacacaatctctagaaacacgtacgcaaatattaattaatcaatttcctttttatagtctcctcacaattcacatgaaacttcatactctattatccgattccatttccatcgtatctttgaatttgacatttgtttgcccaacatgtaattaactttcccttctcatcttaaagatgtaacatgatatatattataacttgtaattaacccaatatttttaactctctatttttacactcatctgacatgtatttttatttttcatttttttttcttatcacatcacctcttacgtgtacaatttttctctttttcttatttctgtcttccataatagtaattaatattcatcggtccgatatgtatacagcccaaaaaagtgtgtaaaatcatttttgtatttctaaccctctctttctcatgcaagctagcttcttctttctatttatagcccttctcccttcacccaccaacacaccacaactccaaactttttcctcttgttctcttcttcttcaacacaactagtcataatccagctcatctctctctccctctctctttgttctctctttctctttctccaaaatggctctaaactacccttttttaacctacttcatactactgctagatattcactgtgggaaaaactgagcaatggaaagctccgattctaccagagcttgacattgataacatatcccacaaactccatgatgaccctgaaaccattcaaatggcttcaagggactatggccatttaacgcatgaattcccattagctgtgtttcgtccatcttctatagatgacatagtcaccttgataaaatcttcgtacaatagctttgccccttttgacatagctgcgaggggccaaggccactccactcatggacaagccatggctcgtgatgggattgtggtggacatggccagcctaagaaaacaaagaaatggggttgcgattagtgtctctaaggaccctttgatgggtcactatgctgatgttggaggggaacaactctggattgatgtgctacatgccacacttgaatatggacttgcaccagtttcttggactgattatttgtacttgaccgtgggagggacactttctaatgctggaatcagtggccagagcttccgttatggacctcaaatcagcaacgttcatgaaatggatgtcatcactggtatggagttagttgttttttttaatcaataaatgttaatattattagcttgttagttttttttgaaaaaattgaattaactttcgtttcctcttttctttctttttttaaccacacaattaatctaataactactggtattaagttagtttattttccatttttcatatataagttaggatttctaattaaaattgacatttcgtaccaccactacaaaaaaataatgtatcagtggcacaaaaaaatatattggcatcacttgtttttttagtcattaatattttgtagcatcacaaaaaatatggtgacaagttttctaaaaattacaaattaactgattcgtcagtgatgttaatgattttttagtgcgtcttggcaactaatgttttcatcttatataaaattagaaacaatagcggcaacagcacctgacattgtgtttgtgttttgcgtgtttctatcgcctaatttttgttgagaacgtgttcgtgaaacttggaaaaagagaaaattgaaattttcttgagatatctaccacttaagaaaaacaaatggctgtttccgttttgtctcttatgacatgacatggtacgtcatagatgaagttctgctaaatatatttgatatgatttcttgaacacgttttatatattcccacttcccagttagtgtggttgttgaatctaattaaaacaggaatagtctttgtctacaatatgggtgagcgatgcaaactttccaagggtttagaagttagaactatataggtccacggtcataattttatattcttgattaactttatgttggttaagtcgttcatatttggtcaattcattcatatgagaaaatactgaaatacaaacatggaaaaatgttaattactcttataattggcgcatgcatgcatctaaattatatgattttaataaatagtttttgtcatctacttgatttcaggaaaaggagagttcgtaacatgctcttcacagaagaacttggagttattccacgcggttcttggaggcttgggacaatttggagttatagcaagggcgagaattgctcttgagccagcacccaaaagggtacgtttatagagaattgactagaattttgtcttgtagcttttcctccaccaattcatatagtgacacctaatcgaattgtcatttttttttacggtgaattgtcattttgtaaatctaccaagtggtagttggcacccatatatgtatgaactatagtaccatacatttcattttatgttggtgtgttagtcatccatgatgaacacatacacaaatgaaaataggacgagttatacgtacgtaagggtttgaatcactgaatgtggatttttgaagttgaaagcatattaatcttggtttgaaaaagaaaaaaaaaatcggaagtccctcttgaagttatcatgactcttatattaagccaatagaattagaaaaactataattatgaatgatcatgttaattctttcagtgacttaaaatcttatctacaaaaagtacccttttgaaaaagaccttcacttaagtccatgcatacagtactaatcttacatacttgagagttgagacttgaagcatgaggagatttgaagtctggagaaacaagccaccacatattaattactaccgtattcttatctttatttatccttccaattttgatgggactggttgcacatacattcatacatactaacatacataaatacgtctctctctcatgtatttcattttattatattctatttcgttagtaagtttactagtataagacattattaatggtgaatttttgttggcatgcaggttaagtgggtcagactactttatagtgacttttctgcttttaccaaagaccaggaacgattaatctcaatcaatggaaggaaacaaaagaacgcattggattttctggaagggatgctgctaatgaaccaaggccccataaataattggagatcctctttcttccctctatctgaccatcccagaatagcttctttaataactgaacatagcatcctctactgtcttgaagtggctaaatattatgacgaacaaaccgagttaaatgtggacaaggtaacctcgtctagtcatatctattatatatagttagatcttgtcacatttctttgtttaaaaaataaaataaaaggcacaatcccaaaaagtcaaaagcaaatgcctagatattgtgtgttttcttggatattaattattacaccttaataacccataataatttttttatttttctttgtctctgtaggaaattgaagttttgctccaaggactagcctatatccctggatttaattatgagaaaaatgtctcgtacgttgagttcttgaatagggtccgaagtggagagttgaaacttcagtcacaaggactgtgggaagttcctcacccgtggcttaatttgtttataccaaaatctcaaatcttggattttaattcaggagtattcaaagatatagttcttaaaagaaacatctcctctggaccagtcttggtttatcccatgaatagaaacaagtaagccttgaatgcatgaatcacaatctagtgtcattataattcaggagtgtgtgatgcaatcttttaattttctgaccattcaactcaatatcaattttatttcttttttcaattaaaatgcaaaagagaataataattaataatatgaaatttaattccaggtgggacgataggatgtcagcatctataccagacgaggatgttttctacacagttgggtttttgcactcaagtgggtttgatacttggaaggcatatgatgctcaaaacagagaaattttggagttctgtagagatgctggcatcatggtcaagcaatatcttcccaaccacagcacacaagaagattggacaaaccattttggtgctaaatggatgaaattcttagaaagaaaacatcagtttgatccaagaatgattctatcacctgggcaaaaaatcttccacaaaaaattacagccagtgttttaaatattttccctaataaaaaaagtaaaaatgttttgtggtgggactacctcaattagatggctagctagggacaggtgtacatacagtgtgaccaagaccaagatggcttttgtatgctaaagtttgcattgctagctagagaaattaataaggtggggcattaaaggctgcatgagtacttttggcacctattatgctacatattaccttagatacgttaggttgacaaagtcgtactggtaggtacaagaagcacagttgtctctcacactgtctgtcacccaacttgctatatagtgtgtggagaaattcggatcatattgaagatgctgtgagttatagtcctccaatattaaatgtttaacgattctgtctttctcttatataattttgttttgcattatattactttcgcactggtgcaaacatatatatcaatgattataattaatttatacaatgacgagtataattgtacccaagttgcatgccataatatttgtcaaaaacaaaaagttgtatgccataatcaatccaggttgctagataataagatagatatgaatatgataacataaaatgctattaaagcaacaaataaacaataacacatagtccttatagggttcataattgatcgatgaacctagctagacgttgattttaggttaatttccagcgaggataaaatttattatataaagaaataactaaccaacacaaaataataaaaaattaaaaaaaaacgaagaaacttattttagagatataatttgttttagtatttgattgtaatttgagagattagctaggctctcaccaagtgagatctagagtatattcttaagaaaatatttataataaagaacccttaaacattttgcaaaacaaagggtggaattaatattaacaacaataattataatatcttgaaaattttatgaaaataatatatatatatatatatatatagagagagagagagagagagagagaaaattctcacaaacaatttttatctgttatttcaaattggtgtatgactccttagtccttagttcatttgtttgcacccagtcctgtcttaggtagttgattttatagttaggtaaattaatttctcgcactcttcgcttgattgtcatttatgggttgaactgttgaagtgattttatattttttaataaatttcacctgcaaaaaaactcaccattagcatacgccccccccccccccccccccccctctcccaaaaaaaaaaaaaaaacgaaagaagattaattagaaagaataaggtcgtgaaatgatgttacaaataaggcatatcagaatcagacgcaagggaagaataaaaacgttacaacaattcgcgcacaatgcaccccaaaaaaaaaatgacaggcacacataccttaaggaagaagaatcaacgctttca

SEQ ID NO: 244 - DNA, 5908 bp, Artificial Sequence
  Synthetic polynucleotide
atttagcatccctccctttgcacaatgtacaatttgggttttgaataatttttgtcacaccttcatttcgtgggactacttctctaatctatacccatcctggtgaaaaataaagggagcgagttacttacttaattaaacatacttaagtttctctctgactctctctcctctttttaattaatttatcataaacaaatatgtgtgcgagtattaaacccgtgcaaaatattagtattattgtttaattttttttccttctcatcaatcataaatatactttttaatacaaaataaaaaatagttaactcagaagatttcttcacttaatcacttcgattcaatattaaaaatcaatccacgctttgttgttttttttcccatgacttatcacgtacatttattatttattatttttctgatgttcttactataaagggaatcactatttgtcacacacaaaactataaagggaatcaaatgatcaattcttatttaaaaactctattaattaaaattacaattacaacaaaaccctaattttatcctccttataattaaacctccacattctctctctctctatcaatacatgtgtttctcaaattaaatattttccatatcctccttttatcatgcaaagtcctcttccattctatatatagcccctacctcctccacctcctttccccactacaacacacaccaacaatcaaatcaatccatccaacctagacatctctcatcttctccaaattaacaaaaatggtagctgggaaatacccttcccccacatacttcatcctcctgctcataaccataacacgtttgatctccacagtgggcaagacctcccaatggctaacgccgcctccggaactcgcctcggtctccctcgatgacaccatcttcagcaagctccgcaacgacccagaggccctccaggggagggcctccagggactacgggaacctcgtccgcgaggttccctcggcggtcttccacccgacctcgtcgagcgacatcgcgaggctgatcaagctgtcgtacaacggttctgtccccttcaagatagcggcgagggggcaagggcactcgacgaggggccaggcgatggtacgtgatggggtggtggtggacatggccgggttcagagagagagggaatggagagggaataagggttgtgatgagtgttgttgtggaccctaataataagaatggttatggttactattatgctgatgttggaggggaacagttgtggatcgatgtgctaaacgccacgcttgagcatggacttgcacctatgtcctggactgattacttgtacttgacggtgggaggaactctctccaatgctggcatcagtggccagacattccgctatggtcctcaaatcaccactgtccgccaaatggacgtcatcactggtaagacaactttcaatttattcagttaattttatcatataattttaccaaatacttataaaccatatcagaaacttttaatttaatcaactaactcacaattagtttaatcatatacttttaatttaatccactaacttataaatttgtaacttttcagcttggaggtttgtaggttataagtctcaactttccactaacttataagttagttttagttttattgtatgtggtacttttgaaaattcaaggattttggtactataataactcgttcaactgttggcttagtatcaaaactcttggattttcaagtgtacttcaacaaccatcttaatttaattgatcagggttttaatattgtgaaaattggtcattggacaacttggaaagtgacacagcttggaaaagaaggaaagagggagatgggaagggaaaagaaagaaaataacttttaaaattagttgcgtgaaaaaattaaggttgctgaattaaattatggttcaccacgactctaattgtggcaacccaacgtgccgtggttgtggatattttcagaactttattgcaacttcggttatagtggcgtttgttcaattcattttttaatgtatcagactgtgattgcgattgaaattttataaaatctttttttttttaaacttgttcttttgattaggattaggaatttcagaaacttgattctatttcatatacttttttttaatgtaataccgaattagtggttgataaacgagtctttgtctacaaatttggtgaatgttagcaaccgctttccatctggtcccatgcttgaaaattttcttaaccatggaaattagttcacacggacagtcatagccttcaattcttgattaattgtttccttttctaaaatatggtgatactattatattattggtccaaggtcttgttttggtcaaatttttttattagaaataaacgggctgctgaattttaatttactcaagtgtttcttaaagaatatgtatgcatgcatgcaattatatattattattattatcattactgttatgtttaatcaagtttaatttggtttggttcaggaaagggagaatttgtgacttgctctcagcagacgaattcggagttgttccacgcggttctgggggcttaggacaatttggaattataacaagggcaagaatcgctcttgccccagctcccaagagggtacgtttaaaatcttcaagaattgactaggactttgtcttgttgcttcttcctccaacatctctcacatagtaacgccaatttctgcatatgttacattattaattcaaccatcaagctttagggaagcatcaaatgtccttgtcctaaatgctttatgtcatcatttttcttggcaccctttcgtttcacattgtgttagtgcatattagtcatccatgaaagacacatgaaaataaaatttgttggaaaaatataaatcatattttcataagtcttttgaaatatacagtaaccttagagaccttaagcaattaagccaataaaaagggtcgtattatcaaaccccaactaacaactattagaaaatactaacaagtataggtgcatacataaatatgtttccactagaaagtatataaagttggtgagatgattcattttgaattttagtaccttaattatttaactttatccttctatttgatgggactcatcgcataagccatacatatatacataatcatgcgttcattattgtttttcattatgagttaatgagttgattgtatgaactaatggtgaatttctcattggcaggttaaatgggtgagacttttgtacaatgacttttctgctttcaccaaagaccaggaacaactaatctcaatcactagaaggaaacaaaatattgcactggattatttggaaggattgctgctaatgcaccaaggacccataaataattggagatcttctttcttccctttagccgaccatgcccgaataatttcgctagtaactaaacacagcgtcctctattgcctagaagttgccaaatattatgatggccaaaatgaaaacaatgtggacaaggtaccgtctccattcatgtgcatttgccttcatgatgtgtcttttatttcttttcttttaattttttgtctcaccttatataataaccctttgtcacactcaatattattatatttttaaagagtttaatggttatacactatttttactttatttaattataaattatcattgatatattttttaagataattatcataaaagttaataaatttatcagttataattgaatgattgtataaaattatttaatttatattgcataatttattttctatttgtaatctttttttactataagttgttatattgtaagtaattaatattctcattttcatgattgtgtaggaactcaaagttttactacaaggactgagctatatccctggattttactatgaaaaagatgtctcgtatgttgagttcttgaatagagttcgaagtggagagttgaagctacaatcacaaggactatgggatgttcctcacccatggcttaatttgtttataccgaaatctcaaatcatggaatttgactcgggcgtgttcaagaatatcatccttaaacgaaacattaccacaggacccgtcttggtttaccccatgaatagaaacaagtaattgagcttaactaactaatctcaatttgtattgttatcattaggaaaaatgttaattggtacgaaaactatatactacactattttcattaaaattcatgaaagtgaaatttctctttcctaaaataacttctttctcttaaaatgaatttttgtttttctcaatctccatcaattacttatttccttttttgaacgtttgaaaagtcattcataacttttttttcataaaaaggtcatttcgtaccaattaaatagcattgcctttattatcatatgtacacaattcttctcttcactcacttctctctttttttttcccattaaaattgtaaaacaaataatcaggtgggacaataggatgtcagcatcaatacccgacgaggatatcttctacacagttggatttttgcattcaagtgggtttgataattggaaggcctatgatgctcaaaataaagaaattctacaattttgtaacgattctgggatcaaggttaagcaatatcttccccactaccgcacacaagaagattggacaaaccattttggccctaaatggaggacttttgtagaaagaaaacaccagtttgatccaaaaatgattctatcacctggacaaagaatctttaacaattaaactagctttaaaaaatatatataatatggtgggactacccaagttagctagctggctgatctcaagtgtacacataggacccagaattcagatgatagcctttgtacttgtttttgttaagagggtggggttaaaagctgcatgactttggcatatatgtagatcaggttacacatactttagatacgttaggttgacaaaatcatgtgtgaaagatgcacacagctagctgtgtacctttctttctctctctctctttctttctctctgtccctcaatttgtctatcactaaaaagattactatagtttagaacctagtgaagatggaaaaaaatcattatatagaggatttaattttatcacacgttctaatcatatacattaatattcttaaatgtgcaatgagtgtgttcggtgccttaatgattctttatctttgttaattgttagtatattatagggttttgtttttcccttcctaattttgtaacggccatccctactagcaataattgagatcctaggttaactaaggaagagcattattgtgtccaaattgagagtcctagctgtatgccataataataaatcatcgtaagttgctagatagatgtgataacgccaaatgccttcaaatactattattaatctccatcgcgagatccttcgttgtgattatgtagaaaagattacgctgcttttacaagagaatactccaagaaagcaagtgattgctccttaatataagaatcatacaataaacaaatggtgttgtagtccataaagtgtatttaatatttgatgaaagagtgtgtagacatcaaagtgataaaactaataaatttaagtttgatgcaattcgaagtcgtagatacttaattaatctctaaatcatattagttttaaaccatacagattttaatatgttgaatggattaatctttaattgtgcattggaaaatattataattcataaaaaaagaaataaagtttagacatgaataattacggactaatgaatgcaacctatatatactacgtctctcaattttgcggagaatttaggaatattatagtatttcactgaaaggacacacaagtggcaatgatgaatattttaattt

SEQ ID NO: 245 - DNA, 5901 bp, Artificial Sequence
  Synthetic polynucleotide
atttagcatccctccctttgcacaatgtacaatttgggttttgaataatttttgtcacaccttcatttcgtgggactacttctctaatctatacccatcctggtgaaaaataaagggagcgagttacttacttaattaaacatacttaagtttctctctgactctctctcctctttttaattaatttatcataaacaaatatgtgtgcgagtattaaacccgtgcaaaatattagtattattgtttaattttttttccttctcatcaatcataaatatactttttaatacaaaataaaaaatagttaactcagaagatttcttcacttaatcacttcgattcaatattaaaaatcaatccacgctttgttgttttttttcccatgacttatcacgtacatttattatttattatttttctgatgttcttactataaagggaatcactatttgtcacacacaaaactataaagggaatcaaatgatcaattcttatttaaaaactctattaattaaaattacaattacaacaaaaccctaattttatcctccttataattaaacctccacattctctctctctctatcaatacatgtgtttctcaaattaaatattttccatatcctccttttatcatgcaaagtcctcttccattctatatatagcccctacctcctccacctcctttccccactacaacacacaccaacaatcaaatcaatccatccaacctagacatctctcatcttctccaaattaacaaaaatggtagctgggaaatacccttcccccacatacttcatcctcctgctcataaccataacacgtttgatctccacagtgggcaagacctcctaacgccgcctccggaactcgcctcggtctccctcgatgacaccatcttcagcaagctccgcaacgacccagaggccctccaggggagggcctccagggactacgggaacctcgtccgcgaggttccctcggcggtcttccacccgacctcgtcgagcgacatcgcgaggctgatcaagctgtcgtacaacggttctgtccccttcaagatagcggcgagggggcaagggcactcgacgaggggccaggcgatggtacgtgatggggtggtggtggacatggccgggttcagagagagagggaatggagagggaataagggttgtgatgagtgttgttgtggaccctaataataagaatggttatggttactattatgctgatgttggaggggaacagttgtggatcgatgtgctaaacgccacgcttgagcatggacttgcacctatgtcctggactgattacttgtacttgacggtgggaggaactctctccaatgctggcatcagtggccagacattccgctatggtcctcaaatcaccactgtccgccaaatggacgtcatcactggtaagacaactttcaatttattcagttaattttatcatataattttaccaaatacttataaaccatatcagaaacttttaatttaatcaactaactcacaattagtttaatcatatacttttaatttaatccactaacttataaatttgtaacttttcagcttggaggtttgtaggttataagtctcaactttccactaacttataagttagttttagttttattgtatgtggtacttttgaaaattcaaggattttggtactataataactcgttcaactgttggcttagtatcaaaactcttggattttcaagtgtacttcaacaaccatcttaatttaattgatcagggttttaatattgtgaaaattggtcattggacaacttggaaagtgacacagcttggaaaagaaggaaagagggagatgggaagggaaaagaaagaaaataacttttaaaattagttgcgtgaaaaaattaaggttgctgaattaaattatggttcaccacgactctaattgtggcaacccaacgtgccgtggttgtggatattttcagaactttattgcaacttcggttatagtggcgtttgttcaattcattttttaatgtatcagactgtgattgcgattgaaattttataaaatctttttttttttaaacttgttcttttgattaggattaggaatttcagaaacttgattctatttcatatacttttttttaatgtaataccgaattagtggttgataaacgagtctttgtctacaaatttggtgaatgttagcaaccgctttccatctggtcccatgcttgaaaattttcttaaccatggaaattagttcacacggacagtcatagccttcaattcttgattaattgtttccttttctaaaatatggtgatactattatattattggtccaaggtcttgttttggtcaaatttttttattagaaataaacgggctgctgaattttaatttactcaagtgtttcttaaagaatatgtatgcatgcatgcaattatatattattattattatcattactgttatgtttaatcaagtttaatttggtttggttcaggaaagggagaatttgtgacttgctctcagcagacgaattcggagttgttccacgcggttctgggggcttaggacaatttggaattataacaagggcaagaatcgctcttgccccagctcccaagagggtacgtttaaaatcttcaagaattgactaggactttgtcttgttgcttcttcctccaacatctctcacatagtaacgccaatttctgcatatgttacattattaattcaaccatcaagctttagggaagcatcaaatgtccttgtcctaaatgctttatgtcatcatttttcttggcaccctttcgtttcacattgtgttagtgcatattagtcatccatgaaagacacatgaaaataaaatttgttggaaaaatataaatcatattttcataagtcttttgaaatatacagtaaccttagagaccttaagcaattaagccaataaaaagggtcgtattatcaaaccccaactaacaactattagaaaatactaacaagtataggtgcatacataaatatgtttccactagaaagtatataaagttggtgagatgattcattttgaattttagtaccttaattatttaactttatccttctatttgatgggactcatcgcataagccatacatatatacataatcatgcgttcattattgtttttcattatgagttaatgagttgattgtatgaactaatggtgaatttctcattggcaggttaaatgggtgagacttttgtacaatgacttttctgctttcaccaaagaccaggaacaactaatctcaatcactagaaggaaacaaaatattgcactggattatttggaaggattgctgctaatgcaccaaggacccataaataattggagatcttctttcttccctttagccgaccatgcccgaataatttcgctagtaactaaacacagcgtcctctattgcctagaagttgccaaatattatgatggccaaaatgaaaacaatgtggacaaggtaccgtctccattcatgtgcatttgccttcatgatgtgtcttttatttcttttcttttaattttttgtctcaccttatataataaccctttgtcacactcaatattattatatttttaaagagtttaatggttatacactatttttactttatttaattataaattatcattgatatattttttaagataattatcataaaagttaataaatttatcagttataattgaatgattgtataaaattatttaatttatattgcataatttattttctatttgtaatctttttttactataagttgttatattgtaagtaattaatattctcattttcatgattgtgtaggaactcaaagttttactacaaggactgagctatatccctggattttactatgaaaaagatgtctcgtatgttgagttcttgaatagagttcgaagtggagagttgaagctacaatcacaaggactatgggatgttcctcacccatggcttaatttgtttataccgaaatctcaaatcatggaatttgactcgggcgtgttcaagaatatcatccttaaacgaaacattaccacaggacccgtcttggtttaccccatgaatagaaacaagtaattgagcttaactaactaatctcaatttgtattgttatcattaggaaaaatgttaattggtacgaaaactatatactacactattttcattaaaattcatgaaagtgaaatttctctttcctaaaataacttctttctcttaaaatgaatttttgtttttctcaatctccatcaattacttatttccttttttgaacgtttgaaaagtcattcataacttttttttcataaaaaggtcatttcgtaccaattaaatagcattgcctttattatcatatgtacacaattcttctcttcactcacttctctctttttttttcccattaaaattgtaaaacaaataatcaggtgggacaataggatgtcagcatcaatacccgacgaggatatcttctacacagttggatttttgcattcaagtgggtttgataattggaaggcctatgatgctcaaaataaagaaattctacaattttgtaacgattctgggatcaaggttaagcaatatcttccccactaccgcacacaagaagattggacaaaccattttggccctaaatggaggacttttgtagaaagaaaacaccagtttgatccaaaaatgattctatcacctggacaaagaatctttaacaattaaactagctttaaaaaatatatataatatggtgggactacccaagttagctagctggctgatctcaagtgtacacataggacccagaattcagatgatagcctttgtacttgtttttgttaagagggtggggttaaaagctgcatgactttggcatatatgtagatcaggttacacatactttagatacgttaggttgacaaaatcatgtgtgaaagatgcacacagctagctgtgtacctttctttctctctctctctttctttctctctgtccctcaatttgtctatcactaaaaagattactatagtttagaacctagtgaagatggaaaaaaatcattatatagaggatttaattttatcacacgttctaatcatatacattaatattcttaaatgtgcaatgagtgtgttcggtgccttaatgattctttatctttgttaattgttagtatattatagggttttgtttttcccttcctaattttgtaacggccatccctactagcaataattgagatcctaggttaactaaggaagagcattattgtgtccaaattgagagtcctagctgtatgccataataataaatcatcgtaagttgctagatagatgtgataacgccaaatgccttcaaatactattattaatctccatcgcgagatccttcgttgtgattatgtagaaaagattacgctgcttttacaagagaatactccaagaaagcaagtgattgctccttaatataagaatcatacaataaacaaatggtgttgtagtccataaagtgtatttaatatttgatgaaagagtgtgtagacatcaaagtgataaaactaataaatttaagtttgatgcaattcgaagtcgtagatacttaattaatctctaaatcatattagttttaaaccatacagattttaatatgttgaatggattaatctttaattgtgcattggaaaatattataattcataaaaaaagaaataaagtttagacatgaataattacggactaatgaatgcaacctatatatactacgtctctcaattttgcggagaatttaggaatattatagtatttcactgaaaggacacacaagtggcaatgatgaatattttaattt

SEQ ID NO: 246 - DNA, 9719 bp, Artificial Sequence
  Synthetic polynucleotide
ttaaaaatatttaaagacttaattaaaaattattaaatatttcagagatctataaattaatttaacataaatgaaagtgttatcaaatatgtctagctaattgaaaaaaaaaaacttaaataaaaatttctttttacctgtcttattaggtgactaaggatataattgataaacaaaagtaattaattaattataagatctttaactttataaaaaataaataaaaaaatcttttaaaaaaaattcgacaattaaaaagaaattaacagagggagtaacaattttttacattaaaaaataaatttaaaatttgagtttaacggtcgtattatcatttagtgataaattatcgatataaattttaagataattattataaaaattaataaatttattatgataatttataattaaatcaaaatataaaattatttaacaccacgtgcataataatctaattcacaaaaaaaagaggtaatttatatagtctcttttattaccttatttttctgagtagtaataaatagacaccaagtgttaataataaagtttatcctttctcctcctatccgtctctttatttatttttcattacaaactttatcaaatctatcaatttctctctcttctatctttctctttgttctatccatacaacttaaaaatgtggttgtagtctaaaattttgcctctaattactgtctaccgcggtgtacttgacctgtacaattacctttcagatgctattataactagagaaatttagctcaagacttaaaaacaatggaccaagagatgtgctgtttccacaatgaggcacgtgtctcctcggtccagtcacgtgaagatccacgtgcctttactctgagcttgagccttagtagtttttcgtggttctctccctgtcctataaatttgagagcctgtatcttacatcctagacacacagtagtgactagctcattcattacaattcatcaccccagccaccaacccttttttcatgccaaaccacgaatttgcttctaattttcatgccaaaccctttcttctttcttttgagagagacgcaatccgctcctctatcttactggctagatcaattcctttctattaatttgcttctttctcaatttgtacatgccttcgatcttatagacatacatatatctcctaaactgcacatagagatttaaaaaaaaagaacaagttacaagtagaatttttttggcaagaatcgaagaaagtgagtgagagaaaagaatcttcatctttctgcatgttgcgtacagaatctttaaagccaaatcctgctcacgttaacccacgacgctgttccaagattttgttctcttctctggagcttcccaacattcttcctttccctcatccaccacccccactacccaataactcatcatcatcgtacgccacacacatgacatgcatgtatcttcattaattccttagcgaaaccacacgtactctagcttgtggggtagtttttaattattagttattcttatcttgttcaattcatggctgtcaacaaccttgttctgttaacattcgccatatgccgtttaatagtaactgtgggattaacggtggtcccggagctgctcgatgtgggactccagggtcgtctcagcgtggacacgttggaactggaggcggcttcggtggatttcgggaggctgagtcgaggggagccttcggaggtagtgcaccctgccacggcggaggatgtggctagggtggtgaaggcggcgttcgagtctccgttcgccgtgtcagcgagggggcacgggcattcgataaacgggcaagccatgataaaagagaagaaaggagtggtgattgaaatgggaaaaagtgatagtggtgaggatggtagtagtattagagtgagtgagaaaggaatgtatgtggacgtgtggggtgggaagttgtggatagatgttttgagtgcaacattggagtatgggctggctcccatgtcttggaccgattacttgtatttgtctgtgggtggaaccctatccaacgctggaattagtggacaaaccttcaatcacggtcctcagatcaccaatgtttatgagctcgatgtcgttacaggtaatttaatatataatataatttgcattcacttttaactaatcacaaatatcattattggtatacttttttaaggtacaatttttgcattcacggttaatttttacaataatagtactatgtttaacatttgacaccttcaaagagaaaaaaaggagttctaccattataaatgattctaaagatggatttatattttcgaaaattaatgtttattatatacatttttaaataatttaaatttgttggtgttattgttgccaaatttgattgttttaccgtaagaaatgatgcttgtgcatgctaataactagttgttcttgttccccaagaggaaaagttaattttcactaattaaacagaggtgtcccactggtttgtcatggtgctgagtacaaacgaatctcgtttatctttagcgtggttaatctcgttgatatcataatgtgtactggtgtgtaacaggaaagggtgagctggtgacatgttcagaagatcgtaactcggagttgttccatgctgttctaggtggtcttggacaatttggaatcatcacaagggctagaattgctctcgaaccagctcctcacagagtgtgtatctctcccacgtactttatctttctttgtctctttttcttactcacacatatacagtacccaattccctctttcctaattgtatgactctcttttcgtactagctcgtgacctcgcacataatatgctaacatttcatgtaataattgaagataaagttataaaaatgaataatattatctgttttcataatgcatacatatacttcatttttattttttagaaacaactcaatgtaaataaaatttaaagtgtaaatattatttctttttttccatcatggaaaaaaaaagtcggttgaacatgatttccatgagatgataggaggggcacacacgatgcgtcttttcttggaaatctttcttcacatcagcgacaaaacctaaaaaaagggtcgttttcgaagggatggtttgggtactcttctaacaatataaagctggaataattatcgtttgcgtgtcgcctgcctgggacattctctgttttaattcatttctcttaacgaactaatatcactatcgattaagggaactgatatcaatgagctataacaatagaatattctcgtctaattaatattattagggtttaatttctatttactgtaaattaatattactataagaaattttacattttcaatcaatcatacatcatcgtggtggtataacttttaaagtgataattactataaaaaggaacatatacttctcatacatgtttatttataattgagagattagataaaatttgtttacacgttcaatagatatattattttctccaataaaattatattagagttagatatatgataaatatttaagtgcaggttcggtggatacgagtactgtattcgaattttgcaaggttttgtaaggaccaggagtatctgatatctctgcatgggaaagcagcaagggagagattcgactatgtggagggtttcgtgatagttgatgaagggctgatcaataattggaggtcttcgttcttttcagctagtaacccagttaaaatcacttccctcaacgctgacggaggtgttttgtactgcttggagattaccaaaaattacgaccaaggaaacgcagattctgttgatgaggtacgtacacacccaatcccacgtacattttctcttctttgtcagtgccttcacttatatataatattattgactgttcatacacttagtgcgctgtcacaataaaatatattcatttaactttcattagtttaattatgtgaagttaccttatttcgtttactaataacgtgttcatatcttatttattgcgtactccacttcgtgtacacattataattgtcattttttatcattttacaccaagaaaataataaataaataagactaataataattttataaaattaatattttattattattaattcatttataaattttgttatttataattaatatgataagcgatataattaaaaaataataattaatgttacatttaaaaattaaaatgataattattttgaaatatttttttctcttgtatgacagttactttaatgttgaagaaaatttagatagaattaaacaaaatgattggacaaaataattaatatattaaagttaaaattaaattatttcagtattatttaagtttgatatttaataaaaataattttttattcgattttacttattttttgattgaattctagattagttgagattcaatttttttaatgagttggagggataggaaaaaaatagttagatagaattaattcttgaaagagtgaaaaaaaaatacattgaagcttttttttattgaaacgtgtaagaatcgagattctaacaaaaaataaaacagggcttaagtagttaagtttttaccaaaatcactccacctagctagctaatgttgcctgtttaatttactttatgtatttttatttttttttcggttacatccatttgtttaaaataattgtttctcaaatatgctacttgatgtccatgttgttcaaattctaaactctagaaaagacatgaaatataagtatgtgtcagaataattaattaagtcttcgggctttttcgtccagtttttgttagttggtcaacacatttatgcttcagagattctataggatttatagggagcaaaatataaaattaacaggcaaacataaaaggacaaaattaatggcgttgatttgaacatcaattaaaaagtaacattgatattcataacaaattaacagacaaatgtgaaagaacaaaaatagcattattcaataccagttgtttttaccacattaaatttgaacgtttagttttgagtcatctgtcctttctctctttatcgttctacccttgagaagatcaacggaagaaatatgtcaattattctgacgaatactctcatatgattatgcgattaatgtcaagattttcttcgttcacaaattcatgcttactttaataattcagtatctgtctgttttatgtttgaagtctgatttaatattgttaatggtatctttaagtaattggtcaaacaattcaattaacaagaaaaatgatatacgctgtccagaggtaatcacattttatttaatttcataatttattgaattaaaaccttggttcttccttcatcgctgtcctcgtatatgattattctctgtacccaaacattgaccagtctctagttgtagaacagaatgcaataaaacatacaaaagaaaacatgtggaagatcttgtgcaatctatcatctcgattcaatcgcaagattgaatgcaacctttacaatagttaattttcactgtttaaaaatgccggcagtccaccagaatattctctcacttgtttttaacttctcttaattaattcttgtcaaagctatatataactgctcacaatagtgggtctcatatcccgacaaaagcaccggctaccttagctagcagctttcctttttcatgcataactatttaatttaagacctagagaggaaaaaagagataaatatagtttaaataagtgatatgatgttatagaaaaataaacataaaatatgttactagagtatttcatttatatatatatatatatactccacttttataaatatatttaaataaatagttatttgtattttgatctactagaatgacgtatgagagatttttttttaatctttaatttttgttattaagtacttatgtttttaaagttaaacaaagttagtctttctattaatattctttacaaaacgtcaaaacctttaagttcattttctgtttaaaatatttataaattatatctattacattatttaaatactttttattcgaagcataccaaccgaaattaaacatcaaaagacattttcttagatttctctttgtacgtttttatggtatgcaggaaatacaagctctattgaaaaagttaaattttataccaacatcggttttcacaacggacttgccttacgtggattttctggatcgtgtacataaggcagagctgaagcttagatccaagggtttatgggatgtacctcatccgtggctcaacctttttgttccaaaatcaaggataggggacttcgacaagggtgtgttcaagggcattcttggaaataagacaagtggacctatcctcatataccctatgaacaaaaacaagtaagtttataaatatatatttccgcatgcatatccatttgttatactatcatattcatccatgtcctagtcatatatatgtagaataaaaccactgcatgtttgcaggcatgcacatatctcctcatatataaaccacatgtctgctgctgatagcctcatatcgactgtcagtgtttagggaagaagaaaagaaaagaaaaagttcaaatgagtaatgaaatagagtatgaagttttgtgatcatatatgaaagagaaaaacctgcaacataatatatattttctacaacgaatattcccaataattatggaactagatgaaaatgtgtgaagattctccacgattgatggacagatagtactattgtcggaattaatggattagggaataaacagaatctagacgtttacattaatcctaataatagatggctgaatctgtttgtttctactttcattgtgtgtattaattaatccaggtcctcgataattcttgaattaaagaagattctgtttgataaatttgtctacacttaattaaacactgacaaaaaaaactaaaatgaattaatttatttttataaattaaaatttacatctcaataaaatattagctatagataacttaaattaagaatgcttaatccaattaagtgaaaataaaaaatatgaaaagaacaagaagcacagtgaggtgcatgtagtggaaagacatggaagacacacgagggttgtattgtagccaacatagcagatgaaaatctgcatcaaagccagctaggaagtgccacgtttattatttcttgaccagaagcaaacaaaatggatggccatgatcatccaactggagagattctggtgtcagaagatcttccatagggacccactcctcgaatggtagggatgtctcctctccactcctcaccttttatactaacctagttccatagacaccgccatatgcatcaacttccaggtcaatatcaatataatatgcacaaataaacaaataaaaaccataataattgcacttagttatgttttttttttttcattttaaaaataccaaaaattaatgataatgatatcacaaataaaaataaaaatgcatgtttgttagagggtatataatataagaaagacaacgcttgtccaaagcatttatatatagagagagagaataagataaaaaattaaatgaattctatgtatcttgccataggtttctgactgataagtcgatggattattaatgtttttgaattagaccacgaattagaaatacttaaaaaagttctattgttatttcaacagagtagtagtaagtaaagtaaatggtttcaagtgtgcagtatagatgaatagaaaaattcaaaagatgattttgggcgatggtgatgtgtaggtgggaccagcgaagctcggtggtgacaccagaagaggatgtgttttacctggtggcatttctaagatcggcattggatactgagacgctggagtacctgactaatcagaaccgtcaaattctgaaattctgccatgatatagagatcaaggtaaaacaatacctgccccattacactacgcagcaggagtggatggaccactttggtgataagtggacccagttcaatgctaggaagatgcaattcgatccccgccgaatcttagccacaggccagcaaatttttcagtttcatccctcactcaccctcaatatgtagaacaaacatgcaaaatggataaataatcttgggttcatgttgagtagcaagtgctgtattattgtaattaggaaatacaaggaggatcatggcaaaaaaagaattagaaggatgtagttgtagtgcactagtgaaggatcaagagttgttgaggtgttgttatctgagggtaataaaattgatgatggagttggatttttgttatgtaatggggtcttgtagcaaattaagtaaggaacccaataaggattaggcccaaagaatataaggagtggtggggcccgctttggaggaggaaaagggcaatgcgcaagtgcacatgagcaccgcccgtctggtttggctgtctcgtttttcaatatagatatcttttattacccatccaaattcctcgtacatataattcttctagatgtattagtctgtatgtttatttcaaatggaaacatttaatcagtgactccttataaaacataatcaacggcatttatgaataaagttaataagttaagagggaaaggaaagaggagaggaaaatgttcaaatgaatcaaatttctcccattaacatttttaataaaattaatatttatcgataaaaaaaatatcaacaagttaagaaaataataataatagacatgtattgctaatataaaagtttccgtacacaattaattaattagaaactatcttaaatatcacttttaacaaagtaataatataaatcaataacataactttttttttatcactataatattaatgtgacatatttgtctattttgagaggttggaaacttggagacgagctctagaaacacatgactttcgcctaaacagaagcaaatcggagtatatggaatgtaagttcaacaaaagtaagagggtatctaactcagatgtgaaaatagaagaccatattatccctcaagtcacacagtttaaatatcttgggtctgtaatacaggatgatggagaaattgaaggggatgtgaatcatcgcattcaagcaggatggatgaaatggagaaaagcatcaggggtgttatgtgatgcaaaggtaccgatcaagctaaagggaaagttttatcggactgcggtaagaccggcgattttgtacggaacagaatgttgggcggtcaagagccaacatgagactaaagtaggtgtagcggagatgaggatgttgcggtggatgtgtggtaagactcgacaggataaaattagaaacggagctattagagagagggttggagtagcgcctattgtagagaagatggtggaaaatagacttaggtgatttgggcatgtagagagaagaccggtagactctgtagtgaggagagtagaccagatggagagaaggcaaacaattcgagacagaggaagacccaaaaaaactataagagaagttatcaagaaggatttcgaacttaatgatttggatagaagtatggtacttgatagaacattatggcagaagttgatccatgtagccgaccccacctagtgggataaggtgttgttgttgttgttgtatttgtctattttattaatgattaatttctgttggagaacttaatt

SEQ ID NO: 247 - DNA, 9678 bp, Artificial Sequence
  Synthetic polynucleotide
ttaaaaatatttaaagacttaattaaaaattattaaatatttcagagatctataaattaatttaacataaatgaaagtgttatcaaatatgtctagctaattgaaaaaaaaaaacttaaataaaaatttctttttacctgtcttattaggtgactaaggatataattgataaacaaaagtaattaattaattataagatctttaactttataaaaaataaataaaaaaatcttttaaaaaaaattcgacaattaaaaagaaattaacagagggagtaacaattttttacattaaaaaataaatttaaaatttgagtttaacggtcgtattatcatttagtgataaattatcgatataaattttaagataattattataaaaattaataaatttattatgataatttataattaaatcaaaatataaaattatttaacaccacgtgcataataatctaattcacaaaaaaaagaggtaatttatatagtctcttttattaccttatttttctgagtagtaataaatagacaccaagtgttaataataaagtttatcctttctcctcctatccgtctctttatttatttttcattacaaactttatcaaatctatcaatttctctctcttctatctttctctttgttctatccatacaacttaaaaatgtggttgtagtctaaaattttgcctctaattactgtctaccgcggtgtacttgacctgtacaattacctttcagatgctattataactagagaaatttagctcaagacttaaaaacaatggaccaagagatgtgctgtttccacaatgaggcacgtgtctcctcggtccagtcacgtgaagatccacgtgcctttactctgagcttgagccttagtagtttttcgtggttctctccctgtcctataaatttgagagcctgtatcttacatcctagacacacagtagtgactagctcattcattacaattcatcaccccagccaccaacccttttttcatgccaaaccacgaatttgcttctaattttcatgccaaaccctttcttctttcttttgagagagacgcaatccgctcctctatcttactggctagatcaattcctttctattaatttgcttctttctcaatttgtacatgccttcgatcttatagacatacatatatctcctaaactgcacatagagatttaaaaaaaaagaacaagttacaagtagaatttttttggcaagaatcgaagaaagtgagtgagagaaaagaatcttcatctttctgcatgttgcgtacagaatctttaaagccaaatcctgctcacgttaacccacgacgctgttccaagattttgttctcttctctggagcttcccaacattcttcctttccctcatccaccacccccactacccaataactcatcatcatcgtacgccacacacatgacatgcatgtatcttcattaattccttagcgaaaccacacgtactctagcttgtggggtagtttttaattattagttattcttatcttgttcaattcatggctgtcaataactgtgggattaacggtggtcccggagctgctcgatgtgggactccagggtcgtctcagcgtggacacgttggaactggaggcggcttcggtggatttcgggaggctgagtcgaggggagccttcggaggtagtgcaccctgccacggcggaggatgtggctagggtggtgaaggcggcgttcgagtctccgttcgccgtgtcagcgagggggcacgggcattcgataaacgggcaagccatgataaaagagaagaaaggagtggtgattgaaatgggaaaaagtgatagtggtgaggatggtagtagtattagagtgagtgagaaaggaatgtatgtggacgtgtggggtgggaagttgtggatagatgttttgagtgcaacattggagtatgggctggctcccatgtcttggaccgattacttgtatttgtctgtgggtggaaccctatccaacgctggaattagtggacaaaccttcaatcacggtcctcagatcaccaatgtttatgagctcgatgtcgttacaggtaatttaatatataatataatttgcattcacttttaactaatcacaaatatcattattggtatacttttttaaggtacaatttttgcattcacggttaatttttacaataatagtactatgtttaacatttgacaccttcaaagagaaaaaaaggagttctaccattataaatgattctaaagatggatttatattttcgaaaattaatgtttattatatacatttttaaataatttaaatttgttggtgttattgttgccaaatttgattgttttaccgtaagaaatgatgcttgtgcatgctaataactagttgttcttgttccccaagaggaaaagttaattttcactaattaaacagaggtgtcccactggtttgtcatggtgctgagtacaaacgaatctcgtttatctttagcgtggttaatctcgttgatatcataatgtgtactggtgtgtaacaggaaagggtgagctggtgacatgttcagaagatcgtaactcggagttgttccatgctgttctaggtggtcttggacaatttggaatcatcacaagggctagaattgctctcgaaccagctcctcacagagtgtgtatctctcccacgtactttatctttctttgtctctttttcttactcacacatatacagtacccaattccctctttcctaattgtatgactctcttttcgtactagctcgtgacctcgcacataatatgctaacatttcatgtaataattgaagataaagttataaaaatgaataatattatctgttttcataatgcatacatatacttcatttttattttttagaaacaactcaatgtaaataaaatttaaagtgtaaatattatttctttttttccatcatggaaaaaaaaagtcggttgaacatgatttccatgagatgataggaggggcacacacgatgcgtcttttcttggaaatctttcttcacatcagcgacaaaacctaaaaaaagggtcgttttcgaagggatggtttgggtactcttctaacaatataaagctggaataattatcgtttgcgtgtcgcctgcctgggacattctctgttttaattcatttctcttaacgaactaatatcactatcgattaagggaactgatatcaatgagctataacaatagaatattctcgtctaattaatattattagggtttaatttctatttactgtaaattaatattactataagaaattttacattttcaatcaatcatacatcatcgtggtggtataacttttaaagtgataattactataaaaaggaacatatacttctcatacatgtttatttataattgagagattagataaaatttgtttacacgttcaatagatatattattttctccaataaaattatattagagttagatatatgataaatatttaagtgcaggttcggtggatacgagtactgtattcgaattttgcaaggttttgtaaggaccaggagtatctgatatctctgcatgggaaagcagcaagggagagattcgactatgtggagggtttcgtgatagttgatgaagggctgatcaataattggaggtcttcgttcttttcagctagtaacccagttaaaatcacttccctcaacgctgacggaggtgttttgtactgcttggagattaccaaaaattacgaccaaggaaacgcagattctgttgatgaggtacgtacacacccaatcccacgtacattttctcttctttgtcagtgccttcacttatatataatattattgactgttcatacacttagtgcgctgtcacaataaaatatattcatttaactttcattagtttaattatgtgaagttaccttatttcgtttactaataacgtgttcatatcttatttattgcgtactccacttcgtgtacacattataattgtcattttttatcattttacaccaagaaaataataaataaataagactaataataattttataaaattaatattttattattattaattcatttataaattttgttatttataattaatatgataagcgatataattaaaaaataataattaatgttacatttaaaaattaaaatgataattattttgaaatatttttttctcttgtatgacagttactttaatgttgaagaaaatttagatagaattaaacaaaatgattggacaaaataattaatatattaaagttaaaattaaattatttcagtattatttaagtttgatatttaataaaaataattttttattcgattttacttattttttgattgaattctagattagttgagattcaatttttttaatgagttggagggataggaaaaaaatagttagatagaattaattcttgaaagagtgaaaaaaaaatacattgaagcttttttttattgaaacgtgtaagaatcgagattctaacaaaaaataaaacagggcttaagtagttaagtttttaccaaaatcactccacctagctagctaatgttgcctgtttaatttactttatgtatttttatttttttttcggttacatccatttgtttaaaataattgtttctcaaatatgctacttgatgtccatgttgttcaaattctaaactctagaaaagacatgaaatataagtatgtgtcagaataattaattaagtcttcgggctttttcgtccagtttttgttagttggtcaacacatttatgcttcagagattctataggatttatagggagcaaaatataaaattaacaggcaaacataaaaggacaaaattaatggcgttgatttgaacatcaattaaaaagtaacattgatattcataacaaattaacagacaaatgtgaaagaacaaaaatagcattattcaataccagttgtttttaccacattaaatttgaacgtttagttttgagtcatctgtcctttctctctttatcgttctacccttgagaagatcaacggaagaaatatgtcaattattctgacgaatactctcatatgattatgcgattaatgtcaagattttcttcgttcacaaattcatgcttactttaataattcagtatctgtctgttttatgtttgaagtctgatttaatattgttaatggtatctttaagtaattggtcaaacaattcaattaacaagaaaaatgatatacgctgtccagaggtaatcacattttatttaatttcataatttattgaattaaaaccttggttcttccttcatcgctgtcctcgtatatgattattctctgtacccaaacattgaccagtctctagttgtagaacagaatgcaataaaacatacaaaagaaaacatgtggaagatcttgtgcaatctatcatctcgattcaatcgcaagattgaatgcaacctttacaatagttaattttcactgtttaaaaatgccggcagtccaccagaatattctctcacttgtttttaacttctcttaattaattcttgtcaaagctatatataactgctcacaatagtgggtctcatatcccgacaaaagcaccggctaccttagctagcagctttcctttttcatgcataactatttaatttaagacctagagaggaaaaaagagataaatatagtttaaataagtgatatgatgttatagaaaaataaacataaaatatgttactagagtatttcatttatatatatatatatatactccacttttataaatatatttaaataaatagttatttgtattttgatctactagaatgacgtatgagagatttttttttaatctttaatttttgttattaagtacttatgtttttaaagttaaacaaagttagtctttctattaatattctttacaaaacgtcaaaacctttaagttcattttctgtttaaaatatttataaattatatctattacattatttaaatactttttattcgaagcataccaaccgaaattaaacatcaaaagacattttcttagatttctctttgtacgtttttatggtatgcaggaaatacaagctctattgaaaaagttaaattttataccaacatcggttttcacaacggacttgccttacgtggattttctggatcgtgtacataaggcagagctgaagcttagatccaagggtttatgggatgtacctcatccgtggctcaacctttttgttccaaaatcaaggataggggacttcgacaagggtgtgttcaagggcattcttggaaataagacaagtggacctatcctcatataccctatgaacaaaaacaagtaagtttataaatatatatttccgcatgcatatccatttgttatactatcatattcatccatgtcctagtcatatatatgtagaataaaaccactgcatgtttgcaggcatgcacatatctcctcatatataaaccacatgtctgctgctgatagcctcatatcgactgtcagtgtttagggaagaagaaaagaaaagaaaaagttcaaatgagtaatgaaatagagtatgaagttttgtgatcatatatgaaagagaaaaacctgcaacataatatatattttctacaacgaatattcccaataattatggaactagatgaaaatgtgtgaagattctccacgattgatggacagatagtactattgtcggaattaatggattagggaataaacagaatctagacgtttacattaatcctaataatagatggctgaatctgtttgtttctactttcattgtgtgtattaattaatccaggtcctcgataattcttgaattaaagaagattctgtttgataaatttgtctacacttaattaaacactgacaaaaaaaactaaaatgaattaatttatttttataaattaaaatttacatctcaataaaatattagctatagataacttaaattaagaatgcttaatccaattaagtgaaaataaaaaatatgaaaagaacaagaagcacagtgaggtgcatgtagtggaaagacatggaagacacacgagggttgtattgtagccaacatagcagatgaaaatctgcatcaaagccagctaggaagtgccacgtttattatttcttgaccagaagcaaacaaaatggatggccatgatcatccaactggagagattctggtgtcagaagatcttccatagggacccactcctcgaatggtagggatgtctcctctccactcctcaccttttatactaacctagttccatagacaccgccatatgcatcaacttccaggtcaatatcaatataatatgcacaaataaacaaataaaaaccataataattgcacttagttatgttttttttttttcattttaaaaataccaaaaattaatgataatgatatcacaaataaaaataaaaatgcatgtttgttagagggtatataatataagaaagacaacgcttgtccaaagcatttatatatagagagagagaataagataaaaaattaaatgaattctatgtatcttgccataggtttctgactgataagtcgatggattattaatgtttttgaattagaccacgaattagaaatacttaaaaaagttctattgttatttcaacagagtagtagtaagtaaagtaaatggtttcaagtgtgcagtatagatgaatagaaaaattcaaaagatgattttgggcgatggtgatgtgtaggtgggaccagcgaagctcggtggtgacaccagaagaggatgtgttttacctggtggcatttctaagatcggcattggatactgagacgctggagtacctgactaatcagaaccgtcaaattctgaaattctgccatgatatagagatcaaggtaaaacaatacctgccccattacactacgcagcaggagtggatggaccactttggtgataagtggacccagttcaatgctaggaagatgcaattcgatccccgccgaatcttagccacaggccagcaaatttttcagtttcatccctcactcaccctcaatatgtagaacaaacatgcaaaatggataaataatcttgggttcatgttgagtagcaagtgctgtattattgtaattaggaaatacaaggaggatcatggcaaaaaaagaattagaaggatgtagttgtagtgcactagtgaaggatcaagagttgttgaggtgttgttatctgagggtaataaaattgatgatggagttggatttttgttatgtaatggggtcttgtagcaaattaagtaaggaacccaataaggattaggcccaaagaatataaggagtggtggggcccgctttggaggaggaaaagggcaatgcgcaagtgcacatgagcaccgcccgtctggtttggctgtctcgtttttcaatatagatatcttttattacccatccaaattcctcgtacatataattcttctagatgtattagtctgtatgtttatttcaaatggaaacatttaatcagtgactccttataaaacataatcaacggcatttatgaataaagttaataagttaagagggaaaggaaagaggagaggaaaatgttcaaatgaatcaaatttctcccattaacatttttaataaaattaatatttatcgataaaaaaaatatcaacaagttaagaaaataataataatagacatgtattgctaatataaaagtttccgtacacaattaattaattagaaactatcttaaatatcacttttaacaaagtaataatataaatcaataacataactttttttttatcactataatattaatgtgacatatttgtctattttgagaggttggaaacttggagacgagctctagaaacacatgactttcgcctaaacagaagcaaatcggagtatatggaatgtaagttcaacaaaagtaagagggtatctaactcagatgtgaaaatagaagaccatattatccctcaagtcacacagtttaaatatcttgggtctgtaatacaggatgatggagaaattgaaggggatgtgaatcatcgcattcaagcaggatggatgaaatggagaaaagcatcaggggtgttatgtgatgcaaaggtaccgatcaagctaaagggaaagttttatcggactgcggtaagaccggcgattttgtacggaacagaatgttgggcggtcaagagccaacatgagactaaagtaggtgtagcggagatgaggatgttgcggtggatgtgtggtaagactcgacaggataaaattagaaacggagctattagagagagggttggagtagcgcctattgtagagaagatggtggaaaatagacttaggtgatttgggcatgtagagagaagaccggtagactctgtagtgaggagagtagaccagatggagagaaggcaaacaattcgagacagaggaagacccaaaaaaactataagagaagttatcaagaaggatttcgaacttaatgatttggatagaagtatggtacttgatagaacattatggcagaagttgatccatgtagccgaccccacctagtgggataaggtgttgttgttgttgttgtatttgtctattttattaatgattaatttctgttggagaacttaatt

SEQ ID NO: 248 - DNA, 9715 bp, Artificial Sequence
  Synthetic polynucleotide
ttaaaaatatttaaagacttaattaaaaattattaaatatttcagagatctataaattaatttaacataaatgaaagtgttatcaaatatgtctagctaattgaaaaaaaaaaacttaaataaaaatttctttttacctgtcttattaggtgactaaggatataattgataaacaaaagtaattaattaattataagatctttaactttataaaaaataaataaaaaaatcttttaaaaaaaattcgacaattaaaaagaaattaacagagggagtaacaattttttacattaaaaaataaatttaaaatttgagtttaacggtcgtattatcatttagtgataaattatcgatataaattttaagataattattataaaaattaataaatttattatgataatttataattaaatcaaaatataaaattatttaacaccacgtgcataataatctaattcacaaaaaaaagaggtaatttatatagtctcttttattaccttatttttctgagtagtaataaatagacaccaagtgttaataataaagtttatcctttctcctcctatccgtctctttatttatttttcattacaaactttatcaaatctatcaatttctctctcttctatctttctctttgttctatccatacaacttaaaaatgtggttgtagtctaaaattttgcctctaattactgtctaccgcggtgtacttgacctgtacaattacctttcagatgctattataactagagaaatttagctcaagacttaaaaacaatggaccaagagatgtgctgtttccacaatgaggcacgtgtctcctcggtccagtcacgtgaagatccacgtgcctttactctgagcttgagccttagtagtttttcgtggttctctccctgtcctataaatttgagagcctgtatcttacatcctagacacacagtagtgactagctcattcattacaattcatcaccccagccaccaacccttttttcatgccaaaccacgaatttgcttctaattttcatgccaaaccctttcttctttcttttgagagagacgcaatccgctcctctatcttactggctagatcaattcctttctattaatttgcttctttctcaatttgtacatgccttcgatcttatagacatacatatatctcctaaactgcacatagagatttaaaaaaaaagaacaagttacaagtagaatttttttggcaagaatcgaagaaagtgagtgagagaaaagaatcttcatctttctgcatgttgcgtacagaatctttaaagccaaatcctgctcacgttaacccacgacgctgttccaagattttgttctcttctctggagcttcccaacattcttcctttccctcatccaccacccccactacccaataactcatcatcatcgtacgccacacacatgacatgcatgtatcttcattaattccttagcgaaaccacacgtactctagcttgtggggtagtttttaattattagttattcttatcttgttcaattcatggctgtcaacaagttctgttaacattcgccatatgccgtttaatagtaactgtgggattaacggtggtcccggagctgctcgatgtgggactccagggtcgtctcagcgtggacacgttggaactggaggcggcttcggtggatttcgggaggctgagtcgaggggagccttcggaggtagtgcaccctgccacggcggaggatgtggctagggtggtgaaggcggcgttcgagtctccgttcgccgtgtcagcgagggggcacgggcattcgataaacgggcaagccatgataaaagagaagaaaggagtggtgattgaaatgggaaaaagtgatagtggtgaggatggtagtagtattagagtgagtgagaaaggaatgtatgtggacgtgtggggtgggaagttgtggatagatgttttgagtgcaacattggagtatgggctggctcccatgtcttggaccgattacttgtatttgtctgtgggtggaaccctatccaacgctggaattagtggacaaaccttcaatcacggtcctcagatcaccaatgtttatgagctcgatgtcgttacaggtaatttaatatataatataatttgcattcacttttaactaatcacaaatatcattattggtatacttttttaaggtacaatttttgcattcacggttaatttttacaataatagtactatgtttaacatttgacaccttcaaagagaaaaaaaggagttctaccattataaatgattctaaagatggatttatattttcgaaaattaatgtttattatatacatttttaaataatttaaatttgttggtgttattgttgccaaatttgattgttttaccgtaagaaatgatgcttgtgcatgctaataactagttgttcttgttccccaagaggaaaagttaattttcactaattaaacagaggtgtcccactggtttgtcatggtgctgagtacaaacgaatctcgtttatctttagcgtggttaatctcgttgatatcataatgtgtactggtgtgtaacaggaaagggtgagctggtgacatgttcagaagatcgtaactcggagttgttccatgctgttctaggtggtcttggacaatttggaatcatcacaagggctagaattgctctcgaaccagctcctcacagagtgtgtatctctcccacgtactttatctttctttgtctctttttcttactcacacatatacagtacccaattccctctttcctaattgtatgactctcttttcgtactagctcgtgacctcgcacataatatgctaacatttcatgtaataattgaagataaagttataaaaatgaataatattatctgttttcataatgcatacatatacttcatttttattttttagaaacaactcaatgtaaataaaatttaaagtgtaaatattatttctttttttccatcatggaaaaaaaaagtcggttgaacatgatttccatgagatgataggaggggcacacacgatgcgtcttttcttggaaatctttcttcacatcagcgacaaaacctaaaaaaagggtcgttttcgaagggatggtttgggtactcttctaacaatataaagctggaataattatcgtttgcgtgtcgcctgcctgggacattctctgttttaattcatttctcttaacgaactaatatcactatcgattaagggaactgatatcaatgagctataacaatagaatattctcgtctaattaatattattagggtttaatttctatttactgtaaattaatattactataagaaattttacattttcaatcaatcatacatcatcgtggtggtataacttttaaagtgataattactataaaaaggaacatatacttctcatacatgtttatttataattgagagattagataaaatttgtttacacgttcaatagatatattattttctccaataaaattatattagagttagatatatgataaatatttaagtgcaggttcggtggatacgagtactgtattcgaattttgcaaggttttgtaaggaccaggagtatctgatatctctgcatgggaaagcagcaagggagagattcgactatgtggagggtttcgtgatagttgatgaagggctgatcaataattggaggtcttcgttcttttcagctagtaacccagttaaaatcacttccctcaacgctgacggaggtgttttgtactgcttggagattaccaaaaattacgaccaaggaaacgcagattctgttgatgaggtacgtacacacccaatcccacgtacattttctcttctttgtcagtgccttcacttatatataatattattgactgttcatacacttagtgcgctgtcacaataaaatatattcatttaactttcattagtttaattatgtgaagttaccttatttcgtttactaataacgtgttcatatcttatttattgcgtactccacttcgtgtacacattataattgtcattttttatcattttacaccaagaaaataataaataaataagactaataataattttataaaattaatattttattattattaattcatttataaattttgttatttataattaatatgataagcgatataattaaaaaataataattaatgttacatttaaaaattaaaatgataattattttgaaatatttttttctcttgtatgacagttactttaatgttgaagaaaatttagatagaattaaacaaaatgattggacaaaataattaatatattaaagttaaaattaaattatttcagtattatttaagtttgatatttaataaaaataattttttattcgattttacttattttttgattgaattctagattagttgagattcaatttttttaatgagttggagggataggaaaaaaatagttagatagaattaattcttgaaagagtgaaaaaaaaatacattgaagcttttttttattgaaacgtgtaagaatcgagattctaacaaaaaataaaacagggcttaagtagttaagtttttaccaaaatcactccacctagctagctaatgttgcctgtttaatttactttatgtatttttatttttttttcggttacatccatttgtttaaaataattgtttctcaaatatgctacttgatgtccatgttgttcaaattctaaactctagaaaagacatgaaatataagtatgtgtcagaataattaattaagtcttcgggctttttcgtccagtttttgttagttggtcaacacatttatgcttcagagattctataggatttatagggagcaaaatataaaattaacaggcaaacataaaaggacaaaattaatggcgttgatttgaacatcaattaaaaagtaacattgatattcataacaaattaacagacaaatgtgaaagaacaaaaatagcattattcaataccagttgtttttaccacattaaatttgaacgtttagttttgagtcatctgtcctttctctctttatcgttctacccttgagaagatcaacggaagaaatatgtcaattattctgacgaatactctcatatgattatgcgattaatgtcaagattttcttcgttcacaaattcatgcttactttaataattcagtatctgtctgttttatgtttgaagtctgatttaatattgttaatggtatctttaagtaattggtcaaacaattcaattaacaagaaaaatgatatacgctgtccagaggtaatcacattttatttaatttcataatttattgaattaaaaccttggttcttccttcatcgctgtcctcgtatatgattattctctgtacccaaacattgaccagtctctagttgtagaacagaatgcaataaaacatacaaaagaaaacatgtggaagatcttgtgcaatctatcatctcgattcaatcgcaagattgaatgcaacctttacaatagttaattttcactgtttaaaaatgccggcagtccaccagaatattctctcacttgtttttaacttctcttaattaattcttgtcaaagctatatataactgctcacaatagtgggtctcatatcccgacaaaagcaccggctaccttagctagcagctttcctttttcatgcataactatttaatttaagacctagagaggaaaaaagagataaatatagtttaaataagtgatatgatgttatagaaaaataaacataaaatatgttactagagtatttcatttatatatatatatatatactccacttttataaatatatttaaataaatagttatttgtattttgatctactagaatgacgtatgagagatttttttttaatctttaatttttgttattaagtacttatgtttttaaagttaaacaaagttagtctttctattaatattctttacaaaacgtcaaaacctttaagttcattttctgtttaaaatatttataaattatatctattacattatttaaatactttttattcgaagcataccaaccgaaattaaacatcaaaagacattttcttagatttctctttgtacgtttttatggtatgcaggaaatacaagctctattgaaaaagttaaattttataccaacatcggttttcacaacggacttgccttacgtggattttctggatcgtgtacataaggcagagctgaagcttagatccaagggtttatgggatgtacctcatccgtggctcaacctttttgttccaaaatcaaggataggggacttcgacaagggtgtgttcaagggcattcttggaaataagacaagtggacctatcctcatataccctatgaacaaaaacaagtaagtttataaatatatatttccgcatgcatatccatttgttatactatcatattcatccatgtcctagtcatatatatgtagaataaaaccactgcatgtttgcaggcatgcacatatctcctcatatataaaccacatgtctgctgctgatagcctcatatcgactgtcagtgtttagggaagaagaaaagaaaagaaaaagttcaaatgagtaatgaaatagagtatgaagttttgtgatcatatatgaaagagaaaaacctgcaacataatatatattttctacaacgaatattcccaataattatggaactagatgaaaatgtgtgaagattctccacgattgatggacagatagtactattgtcggaattaatggattagggaataaacagaatctagacgtttacattaatcctaataatagatggctgaatctgtttgtttctactttcattgtgtgtattaattaatccaggtcctcgataattcttgaattaaagaagattctgtttgataaatttgtctacacttaattaaacactgacaaaaaaaactaaaatgaattaatttatttttataaattaaaatttacatctcaataaaatattagctatagataacttaaattaagaatgcttaatccaattaagtgaaaataaaaaatatgaaaagaacaagaagcacagtgaggtgcatgtagtggaaagacatggaagacacacgagggttgtattgtagccaacatagcagatgaaaatctgcatcaaagccagctaggaagtgccacgtttattatttcttgaccagaagcaaacaaaatggatggccatgatcatccaactggagagattctggtgtcagaagatcttccatagggacccactcctcgaatggtagggatgtctcctctccactcctcaccttttatactaacctagttccatagacaccgccatatgcatcaacttccaggtcaatatcaatataatatgcacaaataaacaaataaaaaccataataattgcacttagttatgttttttttttttcattttaaaaataccaaaaattaatgataatgatatcacaaataaaaataaaaatgcatgtttgttagagggtatataatataagaaagacaacgcttgtccaaagcatttatatatagagagagagaataagataaaaaattaaatgaattctatgtatcttgccataggtttctgactgataagtcgatggattattaatgtttttgaattagaccacgaattagaaatacttaaaaaagttctattgttatttcaacagagtagtagtaagtaaagtaaatggtttcaagtgtgcagtatagatgaatagaaaaattcaaaagatgattttgggcgatggtgatgtgtaggtgggaccagcgaagctcggtggtgacaccagaagaggatgtgttttacctggtggcatttctaagatcggcattggatactgagacgctggagtacctgactaatcagaaccgtcaaattctgaaattctgccatgatatagagatcaaggtaaaacaatacctgccccattacactacgcagcaggagtggatggaccactttggtgataagtggacccagttcaatgctaggaagatgcaattcgatccccgccgaatcttagccacaggccagcaaatttttcagtttcatccctcactcaccctcaatatgtagaacaaacatgcaaaatggataaataatcttgggttcatgttgagtagcaagtgctgtattattgtaattaggaaatacaaggaggatcatggcaaaaaaagaattagaaggatgtagttgtagtgcactagtgaaggatcaagagttgttgaggtgttgttatctgagggtaataaaattgatgatggagttggatttttgttatgtaatggggtcttgtagcaaattaagtaaggaacccaataaggattaggcccaaagaatataaggagtggtggggcccgctttggaggaggaaaagggcaatgcgcaagtgcacatgagcaccgcccgtctggtttggctgtctcgtttttcaatatagatatcttttattacccatccaaattcctcgtacatataattcttctagatgtattagtctgtatgtttatttcaaatggaaacatttaatcagtgactccttataaaacataatcaacggcatttatgaataaagttaataagttaagagggaaaggaaagaggagaggaaaatgttcaaatgaatcaaatttctcccattaacatttttaataaaattaatatttatcgataaaaaaaatatcaacaagttaagaaaataataataatagacatgtattgctaatataaaagtttccgtacacaattaattaattagaaactatcttaaatatcacttttaacaaagtaataatataaatcaataacataactttttttttatcactataatattaatgtgacatatttgtctattttgagaggttggaaacttggagacgagctctagaaacacatgactttcgcctaaacagaagcaaatcggagtatatggaatgtaagttcaacaaaagtaagagggtatctaactcagatgtgaaaatagaagaccatattatccctcaagtcacacagtttaaatatcttgggtctgtaatacaggatgatggagaaattgaaggggatgtgaatcatcgcattcaagcaggatggatgaaatggagaaaagcatcaggggtgttatgtgatgcaaaggtaccgatcaagctaaagggaaagttttatcggactgcggtaagaccggcgattttgtacggaacagaatgttgggcggtcaagagccaacatgagactaaagtaggtgtagcggagatgaggatgttgcggtggatgtgtggtaagactcgacaggataaaattagaaacggagctattagagagagggttggagtagcgcctattgtagagaagatggtggaaaatagacttaggtgatttgggcatgtagagagaagaccggtagactctgtagtgaggagagtagaccagatggagagaaggcaaacaattcgagacagaggaagacccaaaaaaactataagagaagttatcaagaaggatttcgaacttaatgatttggatagaagtatggtacttgatagaacattatggcagaagttgatccatgtagccgaccccacctagtgggataaggtgttgttgttgttgttgtatttgtctattttattaatgattaatttctgttggagaacttaatt

SEQ ID NO: 249 - DNA, 5734 bp, Artificial Sequence
  Synthetic polynucleotide
ataaatggtagaaatctgtgggttcaaatgttcaattgctggggatcttcgtgatcatgatgattcatacacaatctctagaaacacgtacgcaaatattaattaatcaatttcctttttatagtctcctcacaattcacatgaaacttcatactctattatccgattccatttccatcgtatctttgaatttgacatttgtttgcccaacatgtaattaactttcccttctcatcttaaagatgtaacatgatatatattataacttgtaattaacccaatatttttaactctctatttttacactcatctgacatgtatttttatttttcatttttttttcttatcacatcacctcttacgtgtacaatttttctctttttcttatttctgtcttccataatagtaattaatattcatcggtccgatatgtatacagcccaaaaaagtgtgtaaaatcatttttgtatttctaaccctctctttctcatgcaagctagcttcttctttctatttatagcccttctcccttcacccaccaacacaccacaactccaaactttttcctcttgttctcttcttcttcaacacaactagtcataatccagctcatctctctctccctctctctttgttctctctttctctttctccaaaatggctctaaactacccttttttaacctacttcatactactgctagtattcactgtgggaaaaactgagcaatggaaagctccgattctaccagagcttgacattgataacatatcccacaaactccatgatgaccctgaaacagggactatggccatttaacgcatgaattcccattagctgtgtttcgtccatcttctatagatgacatagtcaccttgataaaatcttcgtacaatagctttgccccttttgacatagctgcgaggggccaaggccactccactcatggacaagccatggctcgtgatgggattgtggtggacatggccagcctaagaaaacaaagaaatggggttgcgattagtgtctctaaggaccctttgatgggtcactatgctgatgttggaggggaacaactctggattgatgtgctacatgccacacttgaatatggacttgcaccagtttcttggactgattatttgtacttgaccgtgggagggacactttctaatgctggaatcagtggccagagcttccgttatggacctcaaatcagcaacgttcatgaaatggatgtcatcactggtatggagttagttgttttttttaatcaataaatgttaatattattagcttgttagttttttttgaaaaaattgaattaactttcgtttcctcttttctttctttttttaaccacacaattaatctaataactactggtattaagttagtttattttccatttttcatatataagttaggatttctaattaaaattgacatttcgtaccaccactacaaaaaaataatgtatcagtggcacaaaaaaatatattggcatcacttgtttttttagtcattaatattttgtagcatcacaaaaaatatggtgacaagttttctaaaaattacaaattaactgattcgtcagtgatgttaatgattttttagtgcgtcttggcaactaatgttttcatcttatataaaattagaaacaatagcggcaacagcacctgacattgtgtttgtgttttgcgtgtttctatcgcctaatttttgttgagaacgtgttcgtgaaacttggaaaaagagaaaattgaaattttcttgagatatctaccacttaagaaaaacaaatggctgtttccgttttgtctcttatgacatgacatggtacgtcatagatgaagttctgctaaatatatttgatatgatttcttgaacacgttttatatattcccacttcccagttagtgtggttgttgaatctaattaaaacaggaatagtctttgtctacaatatgggtgagcgatgcaaactttccaagggtttagaagttagaactatataggtccacggtcataattttatattcttgattaactttatgttggttaagtcgttcatatttggtcaattcattcatatgagaaaatactgaaatacaaacatggaaaaatgttaattactcttataattggcgcatgcatgcatctaaattatatgattttaataaatagtttttgtcatctacttgatttcaggaaaaggagagttcgtaacatgctcttcacagaagaacttggagttattccacgcggttcttggaggcttgggacaatttggagttatagcaagggcgagaattgctcttgagccagcacccaaaagggtacgtttatagagaattgactagaattttgtcttgtagcttttcctccaccaattcatatagtgacacctaatcgaattgtcatttttttttacggtgaattgtcattttgtaaatctaccaagtggtagttggcacccatatatgtatgaactatagtaccatacatttcattttatgttggtgtgttagtcatccatgatgaacacatacacaaatgaaaataggacgagttatacgtacgtaagggtttgaatcactgaatgtggatttttgaagttgaaagcatattaatcttggtttgaaaaagaaaaaaaaaatcggaagtccctcttgaagttatcatgactcttatattaagccaatagaattagaaaaactataattatgaatgatcatgttaattctttcagtgacttaaaatcttatctacaaaaagtacccttttgaaaaagaccttcacttaagtccatgcatacagtactaatcttacatacttgagagttgagacttgaagcatgaggagatttgaagtctggagaaacaagccaccacatattaattactaccgtattcttatctttatttatccttccaattttgatgggactggttgcacatacattcatacatactaacatacataaatacgtctctctctcatgtatttcattttattatattctatttcgttagtaagtttactagtataagacattattaatggtgaatttttgttggcatgcaggttaagtgggtcagactactttatagtgacttttctgcttttaccaaagaccaggaacgattaatctcaatcaatggaaggaaacaaaagaacgcattggattttctggaagggatgctgctaatgaaccaaggccccataaataattggagatcctctttcttccctctatctgaccatcccagaatagcttctttaataactgaacatagcatcctctactgtcttgaagtggctaaatattatgacgaacaaaccgagttaaatgtggacaaggtaacctcgtctagtcatatctattatatatagttagatcttgtcacatttctttgtttaaaaaataaaataaaaggcacaatcccaaaaagtcaaaagcaaatgcctagatattgtgtgttttcttggatattaattattacaccttaataacccataataatttttttatttttctttgtctctgtaggaaattgaagttttgctccaaggactagcctatatccctggatttaattatgagaaaaatgtctcgtacgttgagttcttgaatagggtccgaagtggagagttgaaacttcagtcacaaggactgtgggaagttcctcacccgtggcttaatttgtttataccaaaatctcaaatcttggattttaattcaggagtattcaaagatatagttcttaaaagaaacatctcctctggaccagtcttggtttatcccatgaatagaaacaagtaagccttgaatgcatgaatcacaatctagtgtcattataattcaggagtgtgtgatgcaatcttttaattttctgaccattcaactcaatatcaattttatttcttttttcaattaaaatgcaaaagagaataataattaataatatgaaatttaattccaggtgggacgataggatgtcagcatctataccagacgaggatgttttctacacagttgggtttttgcactcaagtgggtttgatacttggaaggcatatgatgctcaaaacagagaaattttggagttctgtagagatgctggcatcatggtcaagcaatatcttcccaaccacagcacacaagaagattggacaaaccattttggtgctaaatggatgaaattcttagaaagaaaacatcagtttgatccaagaatgattctatcacctgggcaaaaaatcttccacaaaaaattacagccagtgttttaaatattttccctaataaaaaaagtaaaaatgttttgtggtgggactacctcaattagatggctagctagggacaggtgtacatacagtgtgaccaagaccaagatggcttttgtatgctaaagtttgcattgctagctagagaaattaataaggtggggcattaaaggctgcatgagtacttttggcacctattatgctacatattaccttagatacgttaggttgacaaagtcgtactggtaggtacaagaagcacagttgtctctcacactgtctgtcacccaacttgctatatagtgtgtggagaaattcggatcatattgaagatgctgtgagttatagtcctccaatattaaatgtttaacgattctgtctttctcttatataattttgttttgcattatattactttcgcactggtgcaaacatatatatcaatgattataattaatttatacaatgacgagtataattgtacccaagttgcatgccataatatttgtcaaaaacaaaaagttgtatgccataatcaatccaggttgctagataataagatagatatgaatatgataacataaaatgctattaaagcaacaaataaacaataacacatagtccttatagggttcataattgatcgatgaacctagctagacgttgattttaggttaatttccagcgaggataaaatttattatataaagaaataactaaccaacacaaaataataaaaaattaaaaaaaaacgaagaaacttattttagagatataatttgttttagtatttgattgtaatttgagagattagctaggctctcaccaagtgagatctagagtatattcttaagaaaatatttataataaagaacccttaaacattttgcaaaacaaagggtggaattaatattaacaacaataattataatatcttgaaaattttatgaaaataatatatatatatatatatatatagagagagagagagagagagagagaaaattctcacaaacaatttttatctgttatttcaaattggtgtatgactccttagtccttagttcatttgtttgcacccagtcctgtcttaggtagttgattttatagttaggtaaattaatttctcgcactcttcgcttgattgtcatttatgggttgaactgttgaagtgattttatattttttaataaatttcacctgcaaaaaaactcaccattagcatacgccccccccccccccccccccccctctcccaaaaaaaaaaaaaaaacgaaagaagattaattagaaagaataaggtcgtgaaatgatgttacaaataaggcatatcagaatcagacgcaagggaagaataaaaacgttacaacaattcgcgcacaatgcaccccaaaaaaaaaatgacaggcacacataccttaaggaagaagaatcaacgctttca

SEQ ID NO: 250 - DNA, 5908 bp, Artificial Sequence
  Synthetic polynucleotide
atttagcatccctccctttgcacaatgtacaatttgggttttgaataatttttgtcacaccttcatttcgtgggactacttctctaatctatacccatcctggtgaaaaataaagggagcgagttacttacttaattaaacatacttaagtttctctctgactctctctcctctttttaattaatttatcataaacaaatatgtgtgcgagtattaaacccgtgcaaaatattagtattattgtttaattttttttccttctcatcaatcataaatatactttttaatacaaaataaaaaatagttaactcagaagatttcttcacttaatcacttcgattcaatattaaaaatcaatccacgctttgttgttttttttcccatgacttatcacgtacatttattatttattatttttctgatgttcttactataaagggaatcactatttgtcacacacaaaactataaagggaatcaaatgatcaattcttatttaaaaactctattaattaaaattacaattacaacaaaaccctaattttatcctccttataattaaacctccacattctctctctctctatcaatacatgtgtttctcaaattaaatattttccatatcctccttttatcatgcaaagtcctcttccattctatatatagcccctacctcctccacctcctttccccactacaacacacaccaacaatcaaatcaatccatccaacctagacatctctcatcttctccaaattaacaaaaatggtagctgggaaatacccttcccccacatacttcatcctcctgctcataaccataacacgtttgatctccacagtgggcaagacctcccaatggatgacgccgcctccggaactcgcctcggtctccctcgatgacaccatcttcagcaagctccgcaacgacccagaggccctccaggggagggcctccagggactacgggaacctcgtccgcgaggttccctcggcggtcttccacccgacctcgtcgagcgacatcgcgaggctgatcaagctgtcgtacaacggttctgtccccttcaagatagcggcgagggggcaagggcactcgacgaggggccaggcgatggtacgtgatggggtggtggtggacatggccgggttcagagagagagggaatggagagggaataagggttgtgatgagtgttgttgtggaccctaataataagaatggttatggttactattatgctgatgttggaggggaacagttgtggatcgatgtgctaaacgccacgcttgagcatggacttgcacctatgtcctggactgattacttgtacttgacggtgggaggaactctctccaatgctggcatcagtggccagacattccgctatggtcctcaaatcaccactgtccgccaaatggacgtcatcactggtaagacaactttcaatttattcagttaattttatcatataattttaccaaatacttataaaccatatcagaaacttttaatttaatcaactaactcacaattagtttaatcatatacttttaatttaatccactaacttataaatttgtaacttttcagcttggaggtttgtaggttataagtctcaactttccactaacttataagttagttttagttttattgtatgtggtacttttgaaaattcaaggattttggtactataataactcgttcaactgttggcttagtatcaaaactcttggattttcaagtgtacttcaacaaccatcttaatttaattgatcagggttttaatattgtgaaaattggtcattggacaacttggaaagtgacacagcttggaaaagaaggaaagagggagatgggaagggaaaagaaagaaaataacttttaaaattagttgcgtgaaaaaattaaggttgctgaattaaattatggttcaccacgactctaattgtggcaacccaacgtgccgtggttgtggatattttcagaactttattgcaacttcggttatagtggcgtttgttcaattcattttttaatgtatcagactgtgattgcgattgaaattttataaaatctttttttttttaaacttgttcttttgattaggattaggaatttcagaaacttgattctatttcatatacttttttttaatgtaataccgaattagtggttgataaacgagtctttgtctacaaatttggtgaatgttagcaaccgctttccatctggtcccatgcttgaaaattttcttaaccatggaaattagttcacacggacagtcatagccttcaattcttgattaattgtttccttttctaaaatatggtgatactattatattattggtccaaggtcttgttttggtcaaatttttttattagaaataaacgggctgctgaattttaatttactcaagtgtttcttaaagaatatgtatgcatgcatgcaattatatattattattattatcattactgttatgtttaatcaagtttaatttggtttggttcaggaaagggagaatttgtgacttgctctcagcagacgaattcggagttgttccacgcggttctgggggcttaggacaatttggaattataacaagggcaagaatcgctcttgccccagctcccaagagggtacgtttaaaatcttcaagaattgactaggactttgtcttgttgcttcttcctccaacatctctcacatagtaacgccaatttctgcatatgttacattattaattcaaccatcaagctttagggaagcatcaaatgtccttgtcctaaatgctttatgtcatcatttttcttggcaccctttcgtttcacattgtgttagtgcatattagtcatccatgaaagacacatgaaaataaaatttgttggaaaaatataaatcatattttcataagtcttttgaaatatacagtaaccttagagaccttaagcaattaagccaataaaaagggtcgtattatcaaaccccaactaacaactattagaaaatactaacaagtataggtgcatacataaatatgtttccactagaaagtatataaagttggtgagatgattcattttgaattttagtaccttaattatttaactttatccttctatttgatgggactcatcgcataagccatacatatatacataatcatgcgttcattattgtttttcattatgagttaatgagttgattgtatgaactaatggtgaatttctcattggcaggttaaatgggtgagacttttgtacaatgacttttctgctttcaccaaagaccaggaacaactaatctcaatcactagaaggaaacaaaatattgcactggattatttggaaggattgctgctaatgcaccaaggacccataaataattggagatcttctttcttccctttagccgaccatgcccgaataatttcgctagtaactaaacacagcgtcctctattgcctagaagttgccaaatattatgatggccaaaatgaaaacaatgtggacaaggtaccgtctccattcatgtgcatttgccttcatgatgtgtcttttatttcttttcttttaattttttgtctcaccttatataataaccctttgtcacactcaatattattatatttttaaagagtttaatggttatacactatttttactttatttaattataaattatcattgatatattttttaagataattatcataaaagttaataaatttatcagttataattgaatgattgtataaaattatttaatttatattgcataatttattttctatttgtaatctttttttactataagttgttatattgtaagtaattaatattctcattttcatgattgtgtaggaactcaaagttttactacaaggactgagctatatccctggattttactatgaaaaagatgtctcgtatgttgagttcttgaatagagttcgaagtggagagttgaagctacaatcacaaggactatgggatgttcctcacccatggcttaatttgtttataccgaaatctcaaatcatggaatttgactcgggcgtgttcaagaatatcatccttaaacgaaacattaccacaggacccgtcttggtttaccccatgaatagaaacaagtaattgagcttaactaactaatctcaatttgtattgttatcattaggaaaaatgttaattggtacgaaaactatatactacactattttcattaaaattcatgaaagtgaaatttctctttcctaaaataacttctttctcttaaaatgaatttttgtttttctcaatctccatcaattacttatttccttttttgaacgtttgaaaagtcattcataacttttttttcataaaaaggtcatttcgtaccaattaaatagcattgcctttattatcatatgtacacaattcttctcttcactcacttctctctttttttttcccattaaaattgtaaaacaaataatcaggtgggacaataggatgtcagcatcaatacccgacgaggatatcttctacacagttggatttttgcattcaagtgggtttgataattggaaggcctatgatgctcaaaataaagaaattctacaattttgtaacgattctgggatcaaggttaagcaatatcttccccactaccgcacacaagaagattggacaaaccattttggccctaaatggaggacttttgtagaaagaaaacaccagtttgatccaaaaatgattctatcacctggacaaagaatctttaacaattaaactagctttaaaaaatatatataatatggtgggactacccaagttagctagctggctgatctcaagtgtacacataggacccagaattcagatgatagcctttgtacttgtttttgttaagagggtggggttaaaagctgcatgactttggcatatatgtagatcaggttacacatactttagatacgttaggttgacaaaatcatgtgtgaaagatgcacacagctagctgtgtacctttctttctctctctctctttctttctctctgtccctcaatttgtctatcactaaaaagattactatagtttagaacctagtgaagatggaaaaaaatcattatatagaggatttaattttatcacacgttctaatcatatacattaatattcttaaatgtgcaatgagtgtgttcggtgccttaatgattctttatctttgttaattgttagtatattatagggttttgtttttcccttcctaattttgtaacggccatccctactagcaataattgagatcctaggttaactaaggaagagcattattgtgtccaaattgagagtcctagctgtatgccataataataaatcatcgtaagttgctagatagatgtgataacgccaaatgccttcaaatactattattaatctccatcgcgagatccttcgttgtgattatgtagaaaagattacgctgcttttacaagagaatactccaagaaagcaagtgattgctccttaatataagaatcatacaataaacaaatggtgttgtagtccataaagtgtatttaatatttgatgaaagagtgtgtagacatcaaagtgataaaactaataaatttaagtttgatgcaattcgaagtcgtagatacttaattaatctctaaatcatattagttttaaaccatacagattttaatatgttgaatggattaatctttaattgtgcattggaaaatattataattcataaaaaaagaaataaagtttagacatgaataattacggactaatgaatgcaacctatatatactacgtctctcaattttgcggagaatttaggaatattatagtatttcactgaaaggacacacaagtggcaatgatgaatattttaattt

SEQ ID NO: 251 - DNA, 9686 bp, Artificial Sequence
  Synthetic polynucleotide
ttaaaaatatttaaagacttaattaaaaattattaaatatttcagagatctataaattaatttaacataaatgaaagtgttatcaaatatgtctagctaattgaaaaaaaaaaacttaaataaaaatttctttttacctgtcttattaggtgactaaggatataattgataaacaaaagtaattaattaattataagatctttaactttataaaaaataaataaaaaaatcttttaaaaaaaattcgacaattaaaaagaaattaacagagggagtaacaattttttacattaaaaaataaatttaaaatttgagtttaacggtcgtattatcatttagtgataaattatcgatataaattttaagataattattataaaaattaataaatttattatgataatttataattaaatcaaaatataaaattatttaacaccacgtgcataataatctaattcacaaaaaaaagaggtaatttatatagtctcttttattaccttatttttctgagtagtaataaatagacaccaagtgttaataataaagtttatcctttctcctcctatccgtctctttatttatttttcattacaaactttatcaaatctatcaatttctctctcttctatctttctctttgttctatccatacaacttaaaaatgtggttgtagtctaaaattttgcctctaattactgtctaccgcggtgtacttgacctgtacaattacctttcagatgctattataactagagaaatttagctcaagacttaaaaacaatggaccaagagatgtgctgtttccacaatgaggcacgtgtctcctcggtccagtcacgtgaagatccacgtgcctttactctgagcttgagccttagtagtttttcgtggttctctccctgtcctataaatttgagagcctgtatcttacatcctagacacacagtagtgactagctcattcattacaattcatcaccccagccaccaacccttttttcatgccaaaccacgaatttgcttctaattttcatgccaaaccctttcttctttcttttgagagagacgcaatccgctcctctatcttactggctagatcaattcctttctattaatttgcttctttctcaatttgtacatgccttcgatcttatagacatacatatatctcctaaactgcacatagagatttaaaaaaaaagaacaagttacaagtagaatttttttggcaagaatcgaagaaagtgagtgagagaaaagaatcttcatctttctgcatgttgcgtacagaatctttaaagccaaatcctgctcacgttaacccacgacgctgttccaagattttgttctcttctctggagcttcccaacattcttcctttccctcatccaccacccccactacccaataactcatcatcatcgtacgccacacacatgacatgcatgtatcttcattaattccttagcgaaaccacacgtactctagcttgtggggtagtttttaattattagttattcttttctgttaacattcgccatatgccgtttaatagtaactgtgggattaacggtggtcccggagctgctcgatgtgggactccagggtcgtctcagcgtggacacgttggaactggaggcggcttcggtggatttcgggaggctgagtcgaggggagccttcggaggtagtgcaccctgccacggcggaggatgtggctagggtggtgaaggcggcgttcgagtctccgttcgccgtgtcagcgagggggcacgggcattcgataaacgggcaagccatgataaaagagaagaaaggagtggtgattgaaatgggaaaaagtgatagtggtgaggatggtagtagtattagagtgagtgagaaaggaatgtatgtggacgtgtggggtgggaagttgtggatagatgttttgagtgcaacattggagtatgggctggctcccatgtcttggaccgattacttgtatttgtctgtgggtggaaccctatccaacgctggaattagtggacaaaccttcaatcacggtcctcagatcaccaatgtttatgagctcgatgtcgttacaggtaatttaatatataatataatttgcattcacttttaactaatcacaaatatcattattggtatacttttttaaggtacaatttttgcattcacggttaatttttacaataatagtactatgtttaacatttgacaccttcaaagagaaaaaaaggagttctaccattataaatgattctaaagatggatttatattttcgaaaattaatgtttattatatacatttttaaataatttaaatttgttggtgttattgttgccaaatttgattgttttaccgtaagaaatgatgcttgtgcatgctaataactagttgttcttgttccccaagaggaaaagttaattttcactaattaaacagaggtgtcccactggtttgtcatggtgctgagtacaaacgaatctcgtttatctttagcgtggttaatctcgttgatatcataatgtgtactggtgtgtaacaggaaagggtgagctggtgacatgttcagaagatcgtaactcggagttgttccatgctgttctaggtggtcttggacaatttggaatcatcacaagggctagaattgctctcgaaccagctcctcacagagtgtgtatctctcccacgtactttatctttctttgtctctttttcttactcacacatatacagtacccaattccctctttcctaattgtatgactctcttttcgtactagctcgtgacctcgcacataatatgctaacatttcatgtaataattgaagataaagttataaaaatgaataatattatctgttttcataatgcatacatatacttcatttttattttttagaaacaactcaatgtaaataaaatttaaagtgtaaatattatttctttttttccatcatggaaaaaaaaagtcggttgaacatgatttccatgagatgataggaggggcacacacgatgcgtcttttcttggaaatctttcttcacatcagcgacaaaacctaaaaaaagggtcgttttcgaagggatggtttgggtactcttctaacaatataaagctggaataattatcgtttgcgtgtcgcctgcctgggacattctctgttttaattcatttctcttaacgaactaatatcactatcgattaagggaactgatatcaatgagctataacaatagaatattctcgtctaattaatattattagggtttaatttctatttactgtaaattaatattactataagaaattttacattttcaatcaatcatacatcatcgtggtggtataacttttaaagtgataattactataaaaaggaacatatacttctcatacatgtttatttataattgagagattagataaaatttgtttacacgttcaatagatatattattttctccaataaaattatattagagttagatatatgataaatatttaagtgcaggttcggtggatacgagtactgtattcgaattttgcaaggttttgtaaggaccaggagtatctgatatctctgcatgggaaagcagcaagggagagattcgactatgtggagggtttcgtgatagttgatgaagggctgatcaataattggaggtcttcgttcttttcagctagtaacccagttaaaatcacttccctcaacgctgacggaggtgttttgtactgcttggagattaccaaaaattacgaccaaggaaacgcagattctgttgatgaggtacgtacacacccaatcccacgtacattttctcttctttgtcagtgccttcacttatatataatattattgactgttcatacacttagtgcgctgtcacaataaaatatattcatttaactttcattagtttaattatgtgaagttaccttatttcgtttactaataacgtgttcatatcttatttattgcgtactccacttcgtgtacacattataattgtcattttttatcattttacaccaagaaaataataaataaataagactaataataattttataaaattaatattttattattattaattcatttataaattttgttatttataattaatatgataagcgatataattaaaaaataataattaatgttacatttaaaaattaaaatgataattattttgaaatatttttttctcttgtatgacagttactttaatgttgaagaaaatttagatagaattaaacaaaatgattggacaaaataattaatatattaaagttaaaattaaattatttcagtattatttaagtttgatatttaataaaaataattttttattcgattttacttattttttgattgaattctagattagttgagattcaatttttttaatgagttggagggataggaaaaaaatagttagatagaattaattcttgaaagagtgaaaaaaaaatacattgaagcttttttttattgaaacgtgtaagaatcgagattctaacaaaaaataaaacagggcttaagtagttaagtttttaccaaaatcactccacctagctagctaatgttgcctgtttaatttactttatgtatttttatttttttttcggttacatccatttgtttaaaataattgtttctcaaatatgctacttgatgtccatgttgttcaaattctaaactctagaaaagacatgaaatataagtatgtgtcagaataattaattaagtcttcgggctttttcgtccagtttttgttagttggtcaacacatttatgcttcagagattctataggatttatagggagcaaaatataaaattaacaggcaaacataaaaggacaaaattaatggcgttgatttgaacatcaattaaaaagtaacattgatattcataacaaattaacagacaaatgtgaaagaacaaaaatagcattattcaataccagttgtttttaccacattaaatttgaacgtttagttttgagtcatctgtcctttctctctttatcgttctacccttgagaagatcaacggaagaaatatgtcaattattctgacgaatactctcatatgattatgcgattaatgtcaagattttcttcgttcacaaattcatgcttactttaataattcagtatctgtctgttttatgtttgaagtctgatttaatattgttaatggtatctttaagtaattggtcaaacaattcaattaacaagaaaaatgatatacgctgtccagaggtaatcacattttatttaatttcataatttattgaattaaaaccttggttcttccttcatcgctgtcctcgtatatgattattctctgtacccaaacattgaccagtctctagttgtagaacagaatgcaataaaacatacaaaagaaaacatgtggaagatcttgtgcaatctatcatctcgattcaatcgcaagattgaatgcaacctttacaatagttaattttcactgtttaaaaatgccggcagtccaccagaatattctctcacttgtttttaacttctcttaattaattcttgtcaaagctatatataactgctcacaatagtgggtctcatatcccgacaaaagcaccggctaccttagctagcagctttcctttttcatgcataactatttaatttaagacctagagaggaaaaaagagataaatatagtttaaataagtgatatgatgttatagaaaaataaacataaaatatgttactagagtatttcatttatatatatatatatatactccacttttataaatatatttaaataaatagttatttgtattttgatctactagaatgacgtatgagagatttttttttaatctttaatttttgttattaagtacttatgtttttaaagttaaacaaagttagtctttctattaatattctttacaaaacgtcaaaacctttaagttcattttctgtttaaaatatttataaattatatctattacattatttaaatactttttattcgaagcataccaaccgaaattaaacatcaaaagacattttcttagatttctctttgtacgtttttatggtatgcaggaaatacaagctctattgaaaaagttaaattttataccaacatcggttttcacaacggacttgccttacgtggattttctggatcgtgtacataaggcagagctgaagcttagatccaagggtttatgggatgtacctcatccgtggctcaacctttttgttccaaaatcaaggataggggacttcgacaagggtgtgttcaagggcattcttggaaataagacaagtggacctatcctcatataccctatgaacaaaaacaagtaagtttataaatatatatttccgcatgcatatccatttgttatactatcatattcatccatgtcctagtcatatatatgtagaataaaaccactgcatgtttgcaggcatgcacatatctcctcatatataaaccacatgtctgctgctgatagcctcatatcgactgtcagtgtttagggaagaagaaaagaaaagaaaaagttcaaatgagtaatgaaatagagtatgaagttttgtgatcatatatgaaagagaaaaacctgcaacataatatatattttctacaacgaatattcccaataattatggaactagatgaaaatgtgtgaagattctccacgattgatggacagatagtactattgtcggaattaatggattagggaataaacagaatctagacgtttacattaatcctaataatagatggctgaatctgtttgtttctactttcattgtgtgtattaattaatccaggtcctcgataattcttgaattaaagaagattctgtttgataaatttgtctacacttaattaaacactgacaaaaaaaactaaaatgaattaatttatttttataaattaaaatttacatctcaataaaatattagctatagataacttaaattaagaatgcttaatccaattaagtgaaaataaaaaatatgaaaagaacaagaagcacagtgaggtgcatgtagtggaaagacatggaagacacacgagggttgtattgtagccaacatagcagatgaaaatctgcatcaaagccagctaggaagtgccacgtttattatttcttgaccagaagcaaacaaaatggatggccatgatcatccaactggagagattctggtgtcagaagatcttccatagggacccactcctcgaatggtagggatgtctcctctccactcctcaccttttatactaacctagttccatagacaccgccatatgcatcaacttccaggtcaatatcaatataatatgcacaaataaacaaataaaaaccataataattgcacttagttatgttttttttttttcattttaaaaataccaaaaattaatgataatgatatcacaaataaaaataaaaatgcatgtttgttagagggtatataatataagaaagacaacgcttgtccaaagcatttatatatagagagagagaataagataaaaaattaaatgaattctatgtatcttgccataggtttctgactgataagtcgatggattattaatgtttttgaattagaccacgaattagaaatacttaaaaaagttctattgttatttcaacagagtagtagtaagtaaagtaaatggtttcaagtgtgcagtatagatgaatagaaaaattcaaaagatgattttgggcgatggtgatgtgtaggtgggaccagcgaagctcggtggtgacaccagaagaggatgtgttttacctggtggcatttctaagatcggcattggatactgagacgctggagtacctgactaatcagaaccgtcaaattctgaaattctgccatgatatagagatcaaggtaaaacaatacctgccccattacactacgcagcaggagtggatggaccactttggtgataagtggacccagttcaatgctaggaagatgcaattcgatccccgccgaatcttagccacaggccagcaaatttttcagtttcatccctcactcaccctcaatatgtagaacaaacatgcaaaatggataaataatcttgggttcatgttgagtagcaagtgctgtattattgtaattaggaaatacaaggaggatcatggcaaaaaaagaattagaaggatgtagttgtagtgcactagtgaaggatcaagagttgttgaggtgttgttatctgagggtaataaaattgatgatggagttggatttttgttatgtaatggggtcttgtagcaaattaagtaaggaacccaataaggattaggcccaaagaatataaggagtggtggggcccgctttggaggaggaaaagggcaatgcgcaagtgcacatgagcaccgcccgtctggtttggctgtctcgtttttcaatatagatatcttttattacccatccaaattcctcgtacatataattcttctagatgtattagtctgtatgtttatttcaaatggaaacatttaatcagtgactccttataaaacataatcaacggcatttatgaataaagttaataagttaagagggaaaggaaagaggagaggaaaatgttcaaatgaatcaaatttctcccattaacatttttaataaaattaatatttatcgataaaaaaaatatcaacaagttaagaaaataataataatagacatgtattgctaatataaaagtttccgtacacaattaattaattagaaactatcttaaatatcacttttaacaaagtaataatataaatcaataacataactttttttttatcactataatattaatgtgacatatttgtctattttgagaggttggaaacttggagacgagctctagaaacacatgactttcgcctaaacagaagcaaatcggagtatatggaatgtaagttcaacaaaagtaagagggtatctaactcagatgtgaaaatagaagaccatattatccctcaagtcacacagtttaaatatcttgggtctgtaatacaggatgatggagaaattgaaggggatgtgaatcatcgcattcaagcaggatggatgaaatggagaaaagcatcaggggtgttatgtgatgcaaaggtaccgatcaagctaaagggaaagttttatcggactgcggtaagaccggcgattttgtacggaacagaatgttgggcggtcaagagccaacatgagactaaagtaggtgtagcggagatgaggatgttgcggtggatgtgtggtaagactcgacaggataaaattagaaacggagctattagagagagggttggagtagcgcctattgtagagaagatggtggaaaatagacttaggtgatttgggcatgtagagagaagaccggtagactctgtagtgaggagagtagaccagatggagagaaggcaaacaattcgagacagaggaagacccaaaaaaactataagagaagttatcaagaaggatttcgaacttaatgatttggatagaagtatggtacttgatagaacattatggcagaagttgatccatgtagccgaccccacctagtgggataaggtgttgttgttgttgttgtatttgtctattttattaatgattaatttctgttggagaacttaatt

SEQ ID NO: 252 - DNA, 5760 bp, Artificial Sequence
  Synthetic polynucleotide
ataaatggtagaaatctgtgggttcaaatgttcaattgctggggatcttcgtgatcatgatgattcatacacaatctctagaaacacgtacgcaaatattaattaatcaatttcctttttatagtctcctcacaattcacatgaaacttcatactctattatccgattccatttccatcgtatctttgaatttgacatttgtttgcccaacatgtaattaactttcccttctcatcttaaagatgtaacatgatatatattataacttgtaattaacccaatatttttaactctctatttttacactcatctgacatgtatttttatttttcatttttttttcttatcacatcacctcttacgtgtacaatttttctctttttcttatttctgtcttccataatagtaattaatattcatcggtccgatatgtatacagcccaaaaaagtgtgtaaaatcatttttgtatttctaaccctctctttctcatgcaagctagcttcttctttctatttatagcccttctcccttcacccaccaacacaccacaactccaaactttttcctcttgttctcttcttcttcaacacaactagtcataatccagctcatctctctctccctctctctttgttctctctttctctttctccaaaatggctctaaactacccttttttaacctacttcatactactgctagtaaccataacccgtttgatattcactgtgggaaaaactgagcaatggaaagctccgattctaccagagcttgacattgataacatatcccacaaactccatgatgaccctgaaaatggcttcaagggactatggccatttaacgcatgaattcccattagctgtgtttcgtccatcttctatagatgacatagtcaccttgataaaatcttcgtacaatagctttgccccttttgacatagctgcgaggggccaaggccactccactcatggacaagccatggctcgtgatgggattgtggtggacatggccagcctaagaaaacaaagaaatggggttgcgattagtgtctctaaggaccctttgatgggtcactatgctgatgttggaggggaacaactctggattgatgtgctacatgccacacttgaatatggacttgcaccagtttcttggactgattatttgtacttgaccgtgggagggacactttctaatgctggaatcagtggccagagcttccgttatggacctcaaatcagcaacgttcatgaaatggatgtcatcactggtatggagttagttgttttttttaatcaataaatgttaatattattagcttgttagttttttttgaaaaaattgaattaactttcgtttcctcttttctttctttttttaaccacacaattaatctaataactactggtattaagttagtttattttccatttttcatatataagttaggatttctaattaaaattgacatttcgtaccaccactacaaaaaaataatgtatcagtggcacaaaaaaatatattggcatcacttgtttttttagtcattaatattttgtagcatcacaaaaaatatggtgacaagttttctaaaaattacaaattaactgattcgtcagtgatgttaatgattttttagtgcgtcttggcaactaatgttttcatcttatataaaattagaaacaatagcggcaacagcacctgacattgtgtttgtgttttgcgtgtttctatcgcctaatttttgttgagaacgtgttcgtgaaacttggaaaaagagaaaattgaaattttcttgagatatctaccacttaagaaaaacaaatggctgtttccgttttgtctcttatgacatgacatggtacgtcatagatgaagttctgctaaatatatttgatatgatttcttgaacacgttttatatattcccacttcccagttagtgtggttgttgaatctaattaaaacaggaatagtctttgtctacaatatgggtgagcgatgcaaactttccaagggtttagaagttagaactatataggtccacggtcataattttatattcttgattaactttatgttggttaagtcgttcatatttggtcaattcattcatatgagaaaatactgaaatacaaacatggaaaaatgttaattactcttataattggcgcatgcatgcatctaaattatatgattttaataaatagtttttgtcatctacttgatttcaggaaaaggagagttcgtaacatgctcttcacagaagaacttggagttattccacgcggttcttggaggcttgggacaatttggagttatagcaagggcgagaattgctcttgagccagcacccaaaagggtacgtttatagagaattgactagaattttgtcttgtagcttttcctccaccaattcatatagtgacacctaatcgaattgtcatttttttttacggtgaattgtcattttgtaaatctaccaagtggtagttggcacccatatatgtatgaactatagtaccatacatttcattttatgttggtgtgttagtcatccatgatgaacacatacacaaatgaaaataggacgagttatacgtacgtaagggtttgaatcactgaatgtggatttttgaagttgaaagcatattaatcttggtttgaaaaagaaaaaaaaaatcggaagtccctcttgaagttatcatgactcttatattaagccaatagaattagaaaaactataattatgaatgatcatgttaattctttcagtgacttaaaatcttatctacaaaaagtacccttttgaaaaagaccttcacttaagtccatgcatacagtactaatcttacatacttgagagttgagacttgaagcatgaggagatttgaagtctggagaaacaagccaccacatattaattactaccgtattcttatctttatttatccttccaattttgatgggactggttgcacatacattcatacatactaacatacataaatacgtctctctctcatgtatttcattttattatattctatttcgttagtaagtttactagtataagacattattaatggtgaatttttgttggcatgcaggttaagtgggtcagactactttatagtgacttttctgcttttaccaaagaccaggaacgattaatctcaatcaatggaaggaaacaaaagaacgcattggattttctggaagggatgctgctaatgaaccaaggccccataaataattggagatcctctttcttccctctatctgaccatcccagaatagcttctttaataactgaacatagcatcctctactgtcttgaagtggctaaatattatgacgaacaaaccgagttaaatgtggacaaggtaacctcgtctagtcatatctattatatatagttagatcttgtcacatttctttgtttaaaaaataaaataaaaggcacaatcccaaaaagtcaaaagcaaatgcctagatattgtgtgttttcttggatattaattattacaccttaataacccataataatttttttatttttctttgtctctgtaggaaattgaagttttgctccaaggactagcctatatccctggatttaattatgagaaaaatgtctcgtacgttgagttcttgaatagggtccgaagtggagagttgaaacttcagtcacaaggactgtgggaagttcctcacccgtggcttaatttgtttataccaaaatctcaaatcttggattttaattcaggagtattcaaagatatagttcttaaaagaaacatctcctctggaccagtcttggtttatcccatgaatagaaacaagtaagccttgaatgcatgaatcacaatctagtgtcattataattcaggagtgtgtgatgcaatcttttaattttctgaccattcaactcaatatcaattttatttcttttttcaattaaaatgcaaaagagaataataattaataatatgaaatttaattccaggtgggacgataggatgtcagcatctataccagacgaggatgttttctacacagttgggtttttgcactcaagtgggtttgatacttggaaggcatatgatgctcaaaacagagaaattttggagttctgtagagatgctggcatcatggtcaagcaatatcttcccaaccacagcacacaagaagattggacaaaccattttggtgctaaatggatgaaattcttagaaagaaaacatcagtttgatccaagaatgattctatcacctgggcaaaaaatcttccacaaaaaattacagccagtgttttaaatattttccctaataaaaaaagtaaaaatgttttgtggtgggactacctcaattagatggctagctagggacaggtgtacatacagtgtgaccaagaccaagatggcttttgtatgctaaagtttgcattgctagctagagaaattaataaggtggggcattaaaggctgcatgagtacttttggcacctattatgctacatattaccttagatacgttaggttgacaaagtcgtactggtaggtacaagaagcacagttgtctctcacactgtctgtcacccaacttgctatatagtgtgtggagaaattcggatcatattgaagatgctgtgagttatagtcctccaatattaaatgtttaacgattctgtctttctcttatataattttgttttgcattatattactttcgcactggtgcaaacatatatatcaatgattataattaatttatacaatgacgagtataattgtacccaagttgcatgccataatatttgtcaaaaacaaaaagttgtatgccataatcaatccaggttgctagataataagatagatatgaatatgataacataaaatgctattaaagcaacaaataaacaataacacatagtccttatagggttcataattgatcgatgaacctagctagacgttgattttaggttaatttccagcgaggataaaatttattatataaagaaataactaaccaacacaaaataataaaaaattaaaaaaaaacgaagaaacttattttagagatataatttgttttagtatttgattgtaatttgagagattagctaggctctcaccaagtgagatctagagtatattcttaagaaaatatttataataaagaacccttaaacattttgcaaaacaaagggtggaattaatattaacaacaataattataatatcttgaaaattttatgaaaataatatatatatatatatatatatagagagagagagagagagagagagaaaattctcacaaacaatttttatctgttatttcaaattggtgtatgactccttagtccttagttcatttgtttgcacccagtcctgtcttaggtagttgattttatagttaggtaaattaatttctcgcactcttcgcttgattgtcatttatgggttgaactgttgaagtgattttatattttttaataaatttcacctgcaaaaaaactcaccattagcatacgccccccccccccccccccccccctctcccaaaaaaaaaaaaaaaacgaaagaagattaattagaaagaataaggtcgtgaaatgatgttacaaataaggcatatcagaatcagacgcaagggaagaataaaaacgttacaacaattcgcgcacaatgcaccccaaaaaaaaaatgacaggcacacataccttaaggaagaagaatcaacgctttca

SEQ ID NO: 253 - DNA, 5754 bp, Artificial Sequence; identical to SEQ ID NO: 124
  Synthetic polynucleotide

SEQ ID NO: 254 - DNA, 9716 bp, Artificial Sequence
  Synthetic polynucleotide
ttaaaaatatttaaagacttaattaaaaattattaaatatttcagagatctataaattaatttaacataaatgaaagtgttatcaaatatgtctagctaattgaaaaaaaaaaacttaaataaaaatttctttttacctgtcttattaggtgactaaggatataattgataaacaaaagtaattaattaattataagatctttaactttataaaaaataaataaaaaaatcttttaaaaaaaattcgacaattaaaaagaaattaacagagggagtaacaattttttacattaaaaaataaatttaaaatttgagtttaacggtcgtattatcatttagtgataaattatcgatataaattttaagataattattataaaaattaataaatttattatgataatttataattaaatcaaaatataaaattatttaacaccacgtgcataataatctaattcacaaaaaaaagaggtaatttatatagtctcttttattaccttatttttctgagtagtaataaatagacaccaagtgttaataataaagtttatcctttctcctcctatccgtctctttatttatttttcattacaaactttatcaaatctatcaatttctctctcttctatctttctctttgttctatccatacaacttaaaaatgtggttgtagtctaaaattttgcctctaattactgtctaccgcggtgtacttgacctgtacaattacctttcagatgctattataactagagaaatttagctcaagacttaaaaacaatggaccaagagatgtgctgtttccacaatgaggcacgtgtctcctcggtccagtcacgtgaagatccacgtgcctttactctgagcttgagccttagtagtttttcgtggttctctccctgtcctataaatttgagagcctgtatcttacatcctagacacacagtagtgactagctcattcattacaattcatcaccccagccaccaacccttttttcatgccaaaccacgaatttgcttctaattttcatgccaaaccctttcttctttcttttgagagagacgcaatccgctcctctatcttactggctagatcaattcctttctattaatttgcttctttctcaatttgtacatgccttcgatcttatagacatacatatatctcctaaactgcacatagagatttaaaaaaaaagaacaagttacaagtagaatttttttggcaagaatcgaagaaagtgagtgagagaaaagaatcttcatctttctgcatgttgcgtacagaatctttaaagccaaatcctgctcacgttaacccacgacgctgttccaagattttgttctcttctctggagcttcccaacattcttcctttccctcatccaccacccccactacccaataactcatcatcatcgtacgccacacacatgacatgcatgtatcttcattaattccttagcgaaaccacacgtactctagcttgtggggtagtttttaattattagttattcttatcttgttcaattcatggctgtcaacaatgttctgttaacattcgccatatgccgtttaatagtaactgtgggattaacggtggtcccggagctgctcgatgtgggactccagggtcgtctcagcgtggacacgttggaactggaggcggcttcggtggatttcgggaggctgagtcgaggggagccttcggaggtagtgcaccctgccacggcggaggatgtggctagggtggtgaaggcggcgttcgagtctccgttcgccgtgtcagcgagggggcacgggcattcgataaacgggcaagccatgataaaagagaagaaaggagtggtgattgaaatgggaaaaagtgatagtggtgaggatggtagtagtattagagtgagtgagaaaggaatgtatgtggacgtgtggggtgggaagttgtggatagatgttttgagtgcaacattggagtatgggctggctcccatgtcttggaccgattacttgtatttgtctgtgggtggaaccctatccaacgctggaattagtggacaaaccttcaatcacggtcctcagatcaccaatgtttatgagctcgatgtcgttacaggtaatttaatatataatataatttgcattcacttttaactaatcacaaatatcattattggtatacttttttaaggtacaatttttgcattcacggttaatttttacaataatagtactatgtttaacatttgacaccttcaaagagaaaaaaaggagttctaccattataaatgattctaaagatggatttatattttcgaaaattaatgtttattatatacatttttaaataatttaaatttgttggtgttattgttgccaaatttgattgttttaccgtaagaaatgatgcttgtgcatgctaataactagttgttcttgttccccaagaggaaaagttaattttcactaattaaacagaggtgtcccactggtttgtcatggtgctgagtacaaacgaatctcgtttatctttagcgtggttaatctcgttgatatcataatgtgtactggtgtgtaacaggaaagggtgagctggtgacatgttcagaagatcgtaactcggagttgttccatgctgttctaggtggtcttggacaatttggaatcatcacaagggctagaattgctctcgaaccagctcctcacagagtgtgtatctctcccacgtactttatctttctttgtctctttttcttactcacacatatacagtacccaattccctctttcctaattgtatgactctcttttcgtactagctcgtgacctcgcacataatatgctaacatttcatgtaataattgaagataaagttataaaaatgaataatattatctgttttcataatgcatacatatacttcatttttattttttagaaacaactcaatgtaaataaaatttaaagtgtaaatattatttctttttttccatcatggaaaaaaaaagtcggttgaacatgatttccatgagatgataggaggggcacacacgatgcgtcttttcttggaaatctttcttcacatcagcgacaaaacctaaaaaaagggtcgttttcgaagggatggtttgggtactcttctaacaatataaagctggaataattatcgtttgcgtgtcgcctgcctgggacattctctgttttaattcatttctcttaacgaactaatatcactatcgattaagggaactgatatcaatgagctataacaatagaatattctcgtctaattaatattattagggtttaatttctatttactgtaaattaatattactataagaaattttacattttcaatcaatcatacatcatcgtggtggtataacttttaaagtgataattactataaaaaggaacatatacttctcatacatgtttatttataattgagagattagataaaatttgtttacacgttcaatagatatattattttctccaataaaattatattagagttagatatatgataaatatttaagtgcaggttcggtggatacgagtactgtattcgaattttgcaaggttttgtaaggaccaggagtatctgatatctctgcatgggaaagcagcaagggagagattcgactatgtggagggtttcgtgatagttgatgaagggctgatcaataattggaggtcttcgttcttttcagctagtaacccagttaaaatcacttccctcaacgctgacggaggtgttttgtactgcttggagattaccaaaaattacgaccaaggaaacgcagattctgttgatgaggtacgtacacacccaatcccacgtacattttctcttctttgtcagtgccttcacttatatataatattattgactgttcatacacttagtgcgctgtcacaataaaatatattcatttaactttcattagtttaattatgtgaagttaccttatttcgtttactaataacgtgttcatatcttatttattgcgtactccacttcgtgtacacattataattgtcattttttatcattttacaccaagaaaataataaataaataagactaataataattttataaaattaatattttattattattaattcatttataaattttgttatttataattaatatgataagcgatataattaaaaaataataattaatgttacatttaaaaattaaaatgataattattttgaaatatttttttctcttgtatgacagttactttaatgttgaagaaaatttagatagaattaaacaaaatgattggacaaaataattaatatattaaagttaaaattaaattatttcagtattatttaagtttgatatttaataaaaataattttttattcgattttacttattttttgattgaattctagattagttgagattcaatttttttaatgagttggagggataggaaaaaaatagttagatagaattaattcttgaaagagtgaaaaaaaaatacattgaagcttttttttattgaaacgtgtaagaatcgagattctaacaaaaaataaaacagggcttaagtagttaagtttttaccaaaatcactccacctagctagctaatgttgcctgtttaatttactttatgtatttttatttttttttcggttacatccatttgtttaaaataattgtttctcaaatatgctacttgatgtccatgttgttcaaattctaaactctagaaaagacatgaaatataagtatgtgtcagaataattaattaagtcttcgggctttttcgtccagtttttgttagttggtcaacacatttatgcttcagagattctataggatttatagggagcaaaatataaaattaacaggcaaacataaaaggacaaaattaatggcgttgatttgaacatcaattaaaaagtaacattgatattcataacaaattaacagacaaatgtgaaagaacaaaaatagcattattcaataccagttgtttttaccacattaaatttgaacgtttagttttgagtcatctgtcctttctctctttatcgttctacccttgagaagatcaacggaagaaatatgtcaattattctgacgaatactctcatatgattatgcgattaatgtcaagattttcttcgttcacaaattcatgcttactttaataattcagtatctgtctgttttatgtttgaagtctgatttaatattgttaatggtatctttaagtaattggtcaaacaattcaattaacaagaaaaatgatatacgctgtccagaggtaatcacattttatttaatttcataatttattgaattaaaaccttggttcttccttcatcgctgtcctcgtatatgattattctctgtacccaaacattgaccagtctctagttgtagaacagaatgcaataaaacatacaaaagaaaacatgtggaagatcttgtgcaatctatcatctcgattcaatcgcaagattgaatgcaacctttacaatagttaattttcactgtttaaaaatgccggcagtccaccagaatattctctcacttgtttttaacttctcttaattaattcttgtcaaagctatatataactgctcacaatagtgggtctcatatcccgacaaaagcaccggctaccttagctagcagctttcctttttcatgcataactatttaatttaagacctagagaggaaaaaagagataaatatagtttaaataagtgatatgatgttatagaaaaataaacataaaatatgttactagagtatttcatttatatatatatatatatactccacttttataaatatatttaaataaatagttatttgtattttgatctactagaatgacgtatgagagatttttttttaatctttaatttttgttattaagtacttatgtttttaaagttaaacaaagttagtctttctattaatattctttacaaaacgtcaaaacctttaagttcattttctgtttaaaatatttataaattatatctattacattatttaaatactttttattcgaagcataccaaccgaaattaaacatcaaaagacattttcttagatttctctttgtacgtttttatggtatgcaggaaatacaagctctattgaaaaagttaaattttataccaacatcggttttcacaacggacttgccttacgtggattttctggatcgtgtacataaggcagagctgaagcttagatccaagggtttatgggatgtacctcatccgtggctcaacctttttgttccaaaatcaaggataggggacttcgacaagggtgtgttcaagggcattcttggaaataagacaagtggacctatcctcatataccctatgaacaaaaacaagtaagtttataaatatatatttccgcatgcatatccatttgttatactatcatattcatccatgtcctagtcatatatatgtagaataaaaccactgcatgtttgcaggcatgcacatatctcctcatatataaaccacatgtctgctgctgatagcctcatatcgactgtcagtgtttagggaagaagaaaagaaaagaaaaagttcaaatgagtaatgaaatagagtatgaagttttgtgatcatatatgaaagagaaaaacctgcaacataatatatattttctacaacgaatattcccaataattatggaactagatgaaaatgtgtgaagattctccacgattgatggacagatagtactattgtcggaattaatggattagggaataaacagaatctagacgtttacattaatcctaataatagatggctgaatctgtttgtttctactttcattgtgtgtattaattaatccaggtcctcgataattcttgaattaaagaagattctgtttgataaatttgtctacacttaattaaacactgacaaaaaaaactaaaatgaattaatttatttttataaattaaaatttacatctcaataaaatattagctatagataacttaaattaagaatgcttaatccaattaagtgaaaataaaaaatatgaaaagaacaagaagcacagtgaggtgcatgtagtggaaagacatggaagacacacgagggttgtattgtagccaacatagcagatgaaaatctgcatcaaagccagctaggaagtgccacgtttattatttcttgaccagaagcaaacaaaatggatggccatgatcatccaactggagagattctggtgtcagaagatcttccatagggacccactcctcgaatggtagggatgtctcctctccactcctcaccttttatactaacctagttccatagacaccgccatatgcatcaacttccaggtcaatatcaatataatatgcacaaataaacaaataaaaaccataataattgcacttagttatgttttttttttttcattttaaaaataccaaaaattaatgataatgatatcacaaataaaaataaaaatgcatgtttgttagagggtatataatataagaaagacaacgcttgtccaaagcatttatatatagagagagagaataagataaaaaattaaatgaattctatgtatcttgccataggtttctgactgataagtcgatggattattaatgtttttgaattagaccacgaattagaaatacttaaaaaagttctattgttatttcaacagagtagtagtaagtaaagtaaatggtttcaagtgtgcagtatagatgaatagaaaaattcaaaagatgattttgggcgatggtgatgtgtaggtgggaccagcgaagctcggtggtgacaccagaagaggatgtgttttacctggtggcatttctaagatcggcattggatactgagacgctggagtacctgactaatcagaaccgtcaaattctgaaattctgccatgatatagagatcaaggtaaaacaatacctgccccattacactacgcagcaggagtggatggaccactttggtgataagtggacccagttcaatgctaggaagatgcaattcgatccccgccgaatcttagccacaggccagcaaatttttcagtttcatccctcactcaccctcaatatgtagaacaaacatgcaaaatggataaataatcttgggttcatgttgagtagcaagtgctgtattattgtaattaggaaatacaaggaggatcatggcaaaaaaagaattagaaggatgtagttgtagtgcactagtgaaggatcaagagttgttgaggtgttgttatctgagggtaataaaattgatgatggagttggatttttgttatgtaatggggtcttgtagcaaattaagtaaggaacccaataaggattaggcccaaagaatataaggagtggtggggcccgctttggaggaggaaaagggcaatgcgcaagtgcacatgagcaccgcccgtctggtttggctgtctcgtttttcaatatagatatcttttattacccatccaaattcctcgtacatataattcttctagatgtattagtctgtatgtttatttcaaatggaaacatttaatcagtgactccttataaaacataatcaacggcatttatgaataaagttaataagttaagagggaaaggaaagaggagaggaaaatgttcaaatgaatcaaatttctcccattaacatttttaataaaattaatatttatcgataaaaaaaatatcaacaagttaagaaaataataataatagacatgtattgctaatataaaagtttccgtacacaattaattaattagaaactatcttaaatatcacttttaacaaagtaataatataaatcaataacataactttttttttatcactataatattaatgtgacatatttgtctattttgagaggttggaaacttggagacgagctctagaaacacatgactttcgcctaaacagaagcaaatcggagtatatggaatgtaagttcaacaaaagtaagagggtatctaactcagatgtgaaaatagaagaccatattatccctcaagtcacacagtttaaatatcttgggtctgtaatacaggatgatggagaaattgaaggggatgtgaatcatcgcattcaagcaggatggatgaaatggagaaaagcatcaggggtgttatgtgatgcaaaggtaccgatcaagctaaagggaaagttttatcggactgcggtaagaccggcgattttgtacggaacagaatgttgggcggtcaagagccaacatgagactaaagtaggtgtagcggagatgaggatgttgcggtggatgtgtggtaagactcgacaggataaaattagaaacggagctattagagagagggttggagtagcgcctattgtagagaagatggtggaaaatagacttaggtgatttgggcatgtagagagaagaccggtagactctgtagtgaggagagtagaccagatggagagaaggcaaacaattcgagacagaggaagacccaaaaaaactataagagaagttatcaagaaggatttcgaacttaatgatttggatagaagtatggtacttgatagaacattatggcagaagttgatccatgtagccgaccccacctagtgggataaggtgttgttgttgttgttgtatttgtctattttattaatgattaatttctgttggagaacttaatt

SEQ ID NO: 255 - DNA, 9715 bp, Artificial Sequence
  Synthetic polynucleotide
ttaaaaatatttaaagacttaattaaaaattattaaatatttcagagatctataaattaatttaacataaatgaaagtgttatcaaatatgtctagctaattgaaaaaaaaaaacttaaataaaaatttctttttacctgtcttattaggtgactaaggatataattgataaacaaaagtaattaattaattataagatctttaactttataaaaaataaataaaaaaatcttttaaaaaaaattcgacaattaaaaagaaattaacagagggagtaacaattttttacattaaaaaataaatttaaaatttgagtttaacggtcgtattatcatttagtgataaattatcgatataaattttaagataattattataaaaattaataaatttattatgataatttataattaaatcaaaatataaaattatttaacaccacgtgcataataatctaattcacaaaaaaaagaggtaatttatatagtctcttttattaccttatttttctgagtagtaataaatagacaccaagtgttaataataaagtttatcctttctcctcctatccgtctctttatttatttttcattacaaactttatcaaatctatcaatttctctctcttctatctttctctttgttctatccatacaacttaaaaatgtggttgtagtctaaaattttgcctctaattactgtctaccgcggtgtacttgacctgtacaattacctttcagatgctattataactagagaaatttagctcaagacttaaaaacaatggaccaagagatgtgctgtttccacaatgaggcacgtgtctcctcggtccagtcacgtgaagatccacgtgcctttactctgagcttgagccttagtagtttttcgtggttctctccctgtcctataaatttgagagcctgtatcttacatcctagacacacagtagtgactagctcattcattacaattcatcaccccagccaccaacccttttttcatgccaaaccacgaatttgcttctaattttcatgccaaaccctttcttctttcttttgagagagacgcaatccgctcctctatcttactggctagatcaattcctttctattaatttgcttctttctcaatttgtacatgccttcgatcttatagacatacatatatctcctaaactgcacatagagatttaaaaaaaaagaacaagttacaagtagaatttttttggcaagaatcgaagaaagtgagtgagagaaaagaatcttcatctttctgcatgttgcgtacagaatctttaaagccaaatcctgctcacgttaacccacgacgctgttccaagattttgttctcttctctggagcttcccaacattcttcctttccctcatccaccacccccactacccaataactcatcatcatcgtacgccacacacatgacatgcatgtatcttcattaattccttagcgaaaccacacgtactctagcttgtggggtagtttttaattattagttattcttatcttgttcaattcatggctgtcaacatgttctgttaacattcgccatatgccgtttaatagtaactgtgggattaacggtggtcccggagctgctcgatgtgggactccagggtcgtctcagcgtggacacgttggaactggaggcggcttcggtggatttcgggaggctgagtcgaggggagccttcggaggtagtgcaccctgccacggcggaggatgtggctagggtggtgaaggcggcgttcgagtctccgttcgccgtgtcagcgagggggcacgggcattcgataaacgggcaagccatgataaaagagaagaaaggagtggtgattgaaatgggaaaaagtgatagtggtgaggatggtagtagtattagagtgagtgagaaaggaatgtatgtggacgtgtggggtgggaagttgtggatagatgttttgagtgcaacattggagtatgggctggctcccatgtcttggaccgattacttgtatttgtctgtgggtggaaccctatccaacgctggaattagtggacaaaccttcaatcacggtcctcagatcaccaatgtttatgagctcgatgtcgttacaggtaatttaatatataatataatttgcattcacttttaactaatcacaaatatcattattggtatacttttttaaggtacaatttttgcattcacggttaatttttacaataatagtactatgtttaacatttgacaccttcaaagagaaaaaaaggagttctaccattataaatgattctaaagatggatttatattttcgaaaattaatgtttattatatacatttttaaataatttaaatttgttggtgttattgttgccaaatttgattgttttaccgtaagaaatgatgcttgtgcatgctaataactagttgttcttgttccccaagaggaaaagttaattttcactaattaaacagaggtgtcccactggtttgtcatggtgctgagtacaaacgaatctcgtttatctttagcgtggttaatctcgttgatatcataatgtgtactggtgtgtaacaggaaagggtgagctggtgacatgttcagaagatcgtaactcggagttgttccatgctgttctaggtggtcttggacaatttggaatcatcacaagggctagaattgctctcgaaccagctcctcacagagtgtgtatctctcccacgtactttatctttctttgtctctttttcttactcacacatatacagtacccaattccctctttcctaattgtatgactctcttttcgtactagctcgtgacctcgcacataatatgctaacatttcatgtaataattgaagataaagttataaaaatgaataatattatctgttttcataatgcatacatatacttcatttttattttttagaaacaactcaatgtaaataaaatttaaagtgtaaatattatttctttttttccatcatggaaaaaaaaagtcggttgaacatgatttccatgagatgataggaggggcacacacgatgcgtcttttcttggaaatctttcttcacatcagcgacaaaacctaaaaaaagggtcgttttcgaagggatggtttgggtactcttctaacaatataaagctggaataattatcgtttgcgtgtcgcctgcctgggacattctctgttttaattcatttctcttaacgaactaatatcactatcgattaagggaactgatatcaatgagctataacaatagaatattctcgtctaattaatattattagggtttaatttctatttactgtaaattaatattactataagaaattttacattttcaatcaatcatacatcatcgtggtggtataacttttaaagtgataattactataaaaaggaacatatacttctcatacatgtttatttataattgagagattagataaaatttgtttacacgttcaatagatatattattttctccaataaaattatattagagttagatatatgataaatatttaagtgcaggttcggtggatacgagtactgtattcgaattttgcaaggttttgtaaggaccaggagtatctgatatctctgcatgggaaagcagcaagggagagattcgactatgtggagggtttcgtgatagttgatgaagggctgatcaataattggaggtcttcgttcttttcagctagtaacccagttaaaatcacttccctcaacgctgacggaggtgttttgtactgcttggagattaccaaaaattacgaccaaggaaacgcagattctgttgatgaggtacgtacacacccaatcccacgtacattttctcttctttgtcagtgccttcacttatatataatattattgactgttcatacacttagtgcgctgtcacaataaaatatattcatttaactttcattagtttaattatgtgaagttaccttatttcgtttactaataacgtgttcatatcttatttattgcgtactccacttcgtgtacacattataattgtcattttttatcattttacaccaagaaaataataaataaataagactaataataattttataaaattaatattttattattattaattcatttataaattttgttatttataattaatatgataagcgatataattaaaaaataataattaatgttacatttaaaaattaaaatgataattattttgaaatatttttttctcttgtatgacagttactttaatgttgaagaaaatttagatagaattaaacaaaatgattggacaaaataattaatatattaaagttaaaattaaattatttcagtattatttaagtttgatatttaataaaaataattttttattcgattttacttattttttgattgaattctagattagttgagattcaatttttttaatgagttggagggataggaaaaaaatagttagatagaattaattcttgaaagagtgaaaaaaaaatacattgaagcttttttttattgaaacgtgtaagaatcgagattctaacaaaaaataaaacagggcttaagtagttaagtttttaccaaaatcactccacctagctagctaatgttgcctgtttaatttactttatgtatttttatttttttttcggttacatccatttgtttaaaataattgtttctcaaatatgctacttgatgtccatgttgttcaaattctaaactctagaaaagacatgaaatataagtatgtgtcagaataattaattaagtcttcgggctttttcgtccagtttttgttagttggtcaacacatttatgcttcagagattctataggatttatagggagcaaaatataaaattaacaggcaaacataaaaggacaaaattaatggcgttgatttgaacatcaattaaaaagtaacattgatattcataacaaattaacagacaaatgtgaaagaacaaaaatagcattattcaataccagttgtttttaccacattaaatttgaacgtttagttttgagtcatctgtcctttctctctttatcgttctacccttgagaagatcaacggaagaaatatgtcaattattctgacgaatactctcatatgattatgcgattaatgtcaagattttcttcgttcacaaattcatgcttactttaataattcagtatctgtctgttttatgtttgaagtctgatttaatattgttaatggtatctttaagtaattggtcaaacaattcaattaacaagaaaaatgatatacgctgtccagaggtaatcacattttatttaatttcataatttattgaattaaaaccttggttcttccttcatcgctgtcctcgtatatgattattctctgtacccaaacattgaccagtctctagttgtagaacagaatgcaataaaacatacaaaagaaaacatgtggaagatcttgtgcaatctatcatctcgattcaatcgcaagattgaatgcaacctttacaatagttaattttcactgtttaaaaatgccggcagtccaccagaatattctctcacttgtttttaacttctcttaattaattcttgtcaaagctatatataactgctcacaatagtgggtctcatatcccgacaaaagcaccggctaccttagctagcagctttcctttttcatgcataactatttaatttaagacctagagaggaaaaaagagataaatatagtttaaataagtgatatgatgttatagaaaaataaacataaaatatgttactagagtatttcatttatatatatatatatatactccacttttataaatatatttaaataaatagttatttgtattttgatctactagaatgacgtatgagagatttttttttaatctttaatttttgttattaagtacttatgtttttaaagttaaacaaagttagtctttctattaatattctttacaaaacgtcaaaacctttaagttcattttctgtttaaaatatttataaattatatctattacattatttaaatactttttattcgaagcataccaaccgaaattaaacatcaaaagacattttcttagatttctctttgtacgtttttatggtatgcaggaaatacaagctctattgaaaaagttaaattttataccaacatcggttttcacaacggacttgccttacgtggattttctggatcgtgtacataaggcagagctgaagcttagatccaagggtttatgggatgtacctcatccgtggctcaacctttttgttccaaaatcaaggataggggacttcgacaagggtgtgttcaagggcattcttggaaataagacaagtggacctatcctcatataccctatgaacaaaaacaagtaagtttataaatatatatttccgcatgcatatccatttgttatactatcatattcatccatgtcctagtcatatatatgtagaataaaaccactgcatgtttgcaggcatgcacatatctcctcatatataaaccacatgtctgctgctgatagcctcatatcgactgtcagtgtttagggaagaagaaaagaaaagaaaaagttcaaatgagtaatgaaatagagtatgaagttttgtgatcatatatgaaagagaaaaacctgcaacataatatatattttctacaacgaatattcccaataattatggaactagatgaaaatgtgtgaagattctccacgattgatggacagatagtactattgtcggaattaatggattagggaataaacagaatctagacgtttacattaatcctaataatagatggctgaatctgtttgtttctactttcattgtgtgtattaattaatccaggtcctcgataattcttgaattaaagaagattctgtttgataaatttgtctacacttaattaaacactgacaaaaaaaactaaaatgaattaatttatttttataaattaaaatttacatctcaataaaatattagctatagataacttaaattaagaatgcttaatccaattaagtgaaaataaaaaatatgaaaagaacaagaagcacagtgaggtgcatgtagtggaaagacatggaagacacacgagggttgtattgtagccaacatagcagatgaaaatctgcatcaaagccagctaggaagtgccacgtttattatttcttgaccagaagcaaacaaaatggatggccatgatcatccaactggagagattctggtgtcagaagatcttccatagggacccactcctcgaatggtagggatgtctcctctccactcctcaccttttatactaacctagttccatagacaccgccatatgcatcaacttccaggtcaatatcaatataatatgcacaaataaacaaataaaaaccataataattgcacttagttatgttttttttttttcattttaaaaataccaaaaattaatgataatgatatcacaaataaaaataaaaatgcatgtttgttagagggtatataatataagaaagacaacgcttgtccaaagcatttatatatagagagagagaataagataaaaaattaaatgaattctatgtatcttgccataggtttctgactgataagtcgatggattattaatgtttttgaattagaccacgaattagaaatacttaaaaaagttctattgttatttcaacagagtagtagtaagtaaagtaaatggtttcaagtgtgcagtatagatgaatagaaaaattcaaaagatgattttgggcgatggtgatgtgtaggtgggaccagcgaagctcggtggtgacaccagaagaggatgtgttttacctggtggcatttctaagatcggcattggatactgagacgctggagtacctgactaatcagaaccgtcaaattctgaaattctgccatgatatagagatcaaggtaaaacaatacctgccccattacactacgcagcaggagtggatggaccactttggtgataagtggacccagttcaatgctaggaagatgcaattcgatccccgccgaatcttagccacaggccagcaaatttttcagtttcatccctcactcaccctcaatatgtagaacaaacatgcaaaatggataaataatcttgggttcatgttgagtagcaagtgctgtattattgtaattaggaaatacaaggaggatcatggcaaaaaaagaattagaaggatgtagttgtagtgcactagtgaaggatcaagagttgttgaggtgttgttatctgagggtaataaaattgatgatggagttggatttttgttatgtaatggggtcttgtagcaaattaagtaaggaacccaataaggattaggcccaaagaatataaggagtggtggggcccgctttggaggaggaaaagggcaatgcgcaagtgcacatgagcaccgcccgtctggtttggctgtctcgtttttcaatatagatatcttttattacccatccaaattcctcgtacatataattcttctagatgtattagtctgtatgtttatttcaaatggaaacatttaatcagtgactccttataaaacataatcaacggcatttatgaataaagttaataagttaagagggaaaggaaagaggagaggaaaatgttcaaatgaatcaaatttctcccattaacatttttaataaaattaatatttatcgataaaaaaaatatcaacaagttaagaaaataataataatagacatgtattgctaatataaaagtttccgtacacaattaattaattagaaactatcttaaatatcacttttaacaaagtaataatataaatcaataacataactttttttttatcactataatattaatgtgacatatttgtctattttgagaggttggaaacttggagacgagctctagaaacacatgactttcgcctaaacagaagcaaatcggagtatatggaatgtaagttcaacaaaagtaagagggtatctaactcagatgtgaaaatagaagaccatattatccctcaagtcacacagtttaaatatcttgggtctgtaatacaggatgatggagaaattgaaggggatgtgaatcatcgcattcaagcaggatggatgaaatggagaaaagcatcaggggtgttatgtgatgcaaaggtaccgatcaagctaaagggaaagttttatcggactgcggtaagaccggcgattttgtacggaacagaatgttgggcggtcaagagccaacatgagactaaagtaggtgtagcggagatgaggatgttgcggtggatgtgtggtaagactcgacaggataaaattagaaacggagctattagagagagggttggagtagcgcctattgtagagaagatggtggaaaatagacttaggtgatttgggcatgtagagagaagaccggtagactctgtagtgaggagagtagaccagatggagagaaggcaaacaattcgagacagaggaagacccaaaaaaactataagagaagttatcaagaaggatttcgaacttaatgatttggatagaagtatggtacttgatagaacattatggcagaagttgatccatgtagccgaccccacctagtgggataaggtgttgttgttgttgttgtatttgtctattttattaatgattaatttctgttggagaacttaatt

SEQ ID NO: 256 - DNA, 5760 bp, Artificial Sequence
  Synthetic polynucleotide
ataaatggtagaaatctgtgggttcaaatgttcaattgctggggatcttcgtgatcatgatgattcatacacaatctctagaaacacgtacgcaaatattaattaatcaatttcctttttatagtctcctcacaattcacatgaaacttcatactctattatccgattccatttccatcgtatctttgaatttgacatttgtttgcccaacatgtaattaactttcccttctcatcttaaagatgtaacatgatatatattataacttgtaattaacccaatatttttaactctctatttttacactcatctgacatgtatttttatttttcatttttttttcttatcacatcacctcttacgtgtacaatttttctctttttcttatttctgtcttccataatagtaattaatattcatcggtccgatatgtatacagcccaaaaaagtgtgtaaaatcatttttgtatttctaaccctctctttctcatgcaagctagcttcttctttctatttatagcccttctcccttcacccaccaacacaccacaactccaaactttttcctcttgttctcttcttcttcaacacaactagtcataatccagctcatctctctctccctctctctttgttctctctttctctttctccaaaatggctctaaactacccttttttaacctacttcatactactgctagtaccgtttgatattcactgtgggaaaaactgagcaatggaaagctccgattctaccagagcttgacattgataacatatcccacaaactccatgatgaccctgaaaccattcaaatggcttcaagggactatggccatttaacgcatgaattcccattagctgtgtttcgtccatcttctatagatgacatagtcaccttgataaaatcttcgtacaatagctttgccccttttgacatagctgcgaggggccaaggccactccactcatggacaagccatggctcgtgatgggattgtggtggacatggccagcctaagaaaacaaagaaatggggttgcgattagtgtctctaaggaccctttgatgggtcactatgctgatgttggaggggaacaactctggattgatgtgctacatgccacacttgaatatggacttgcaccagtttcttggactgattatttgtacttgaccgtgggagggacactttctaatgctggaatcagtggccagagcttccgttatggacctcaaatcagcaacgttcatgaaatggatgtcatcactggtatggagttagttgttttttttaatcaataaatgttaatattattagcttgttagttttttttgaaaaaattgaattaactttcgtttcctcttttctttctttttttaaccacacaattaatctaataactactggtattaagttagtttattttccatttttcatatataagttaggatttctaattaaaattgacatttcgtaccaccactacaaaaaaataatgtatcagtggcacaaaaaaatatattggcatcacttgtttttttagtcattaatattttgtagcatcacaaaaaatatggtgacaagttttctaaaaattacaaattaactgattcgtcagtgatgttaatgattttttagtgcgtcttggcaactaatgttttcatcttatataaaattagaaacaatagcggcaacagcacctgacattgtgtttgtgttttgcgtgtttctatcgcctaatttttgttgagaacgtgttcgtgaaacttggaaaaagagaaaattgaaattttcttgagatatctaccacttaagaaaaacaaatggctgtttccgttttgtctcttatgacatgacatggtacgtcatagatgaagttctgctaaatatatttgatatgatttcttgaacacgttttatatattcccacttcccagttagtgtggttgttgaatctaattaaaacaggaatagtctttgtctacaatatgggtgagcgatgcaaactttccaagggtttagaagttagaactatataggtccacggtcataattttatattcttgattaactttatgttggttaagtcgttcatatttggtcaattcattcatatgagaaaatactgaaatacaaacatggaaaaatgttaattactcttataattggcgcatgcatgcatctaaattatatgattttaataaatagtttttgtcatctacttgatttcaggaaaaggagagttcgtaacatgctcttcacagaagaacttggagttattccacgcggttcttggaggcttgggacaatttggagttatagcaagggcgagaattgctcttgagccagcacccaaaagggtacgtttatagagaattgactagaattttgtcttgtagcttttcctccaccaattcatatagtgacacctaatcgaattgtcatttttttttacggtgaattgtcattttgtaaatctaccaagtggtagttggcacccatatatgtatgaactatagtaccatacatttcattttatgttggtgtgttagtcatccatgatgaacacatacacaaatgaaaataggacgagttatacgtacgtaagggtttgaatcactgaatgtggatttttgaagttgaaagcatattaatcttggtttgaaaaagaaaaaaaaaatcggaagtccctcttgaagttatcatgactcttatattaagccaatagaattagaaaaactataattatgaatgatcatgttaattctttcagtgacttaaaatcttatctacaaaaagtacccttttgaaaaagaccttcacttaagtccatgcatacagtactaatcttacatacttgagagttgagacttgaagcatgaggagatttgaagtctggagaaacaagccaccacatattaattactaccgtattcttatctttatttatccttccaattttgatgggactggttgcacatacattcatacatactaacatacataaatacgtctctctctcatgtatttcattttattatattctatttcgttagtaagtttactagtataagacattattaatggtgaatttttgttggcatgcaggttaagtgggtcagactactttatagtgacttttctgcttttaccaaagaccaggaacgattaatctcaatcaatggaaggaaacaaaagaacgcattggattttctggaagggatgctgctaatgaaccaaggccccataaataattggagatcctctttcttccctctatctgaccatcccagaatagcttctttaataactgaacatagcatcctctactgtcttgaagtggctaaatattatgacgaacaaaccgagttaaatgtggacaaggtaacctcgtctagtcatatctattatatatagttagatcttgtcacatttctttgtttaaaaaataaaataaaaggcacaatcccaaaaagtcaaaagcaaatgcctagatattgtgtgttttcttggatattaattattacaccttaataacccataataatttttttatttttctttgtctctgtaggaaattgaagttttgctccaaggactagcctatatccctggatttaattatgagaaaaatgtctcgtacgttgagttcttgaatagggtccgaagtggagagttgaaacttcagtcacaaggactgtgggaagttcctcacccgtggcttaatttgtttataccaaaatctcaaatcttggattttaattcaggagtattcaaagatatagttcttaaaagaaacatctcctctggaccagtcttggtttatcccatgaatagaaacaagtaagccttgaatgcatgaatcacaatctagtgtcattataattcaggagtgtgtgatgcaatcttttaattttctgaccattcaactcaatatcaattttatttcttttttcaattaaaatgcaaaagagaataataattaataatatgaaatttaattccaggtgggacgataggatgtcagcatctataccagacgaggatgttttctacacagttgggtttttgcactcaagtgggtttgatacttggaaggcatatgatgctcaaaacagagaaattttggagttctgtagagatgctggcatcatggtcaagcaatatcttcccaaccacagcacacaagaagattggacaaaccattttggtgctaaatggatgaaattcttagaaagaaaacatcagtttgatccaagaatgattctatcacctgggcaaaaaatcttccacaaaaaattacagccagtgttttaaatattttccctaataaaaaaagtaaaaatgttttgtggtgggactacctcaattagatggctagctagggacaggtgtacatacagtgtgaccaagaccaagatggcttttgtatgctaaagtttgcattgctagctagagaaattaataaggtggggcattaaaggctgcatgagtacttttggcacctattatgctacatattaccttagatacgttaggttgacaaagtcgtactggtaggtacaagaagcacagttgtctctcacactgtctgtcacccaacttgctatatagtgtgtggagaaattcggatcatattgaagatgctgtgagttatagtcctccaatattaaatgtttaacgattctgtctttctcttatataattttgttttgcattatattactttcgcactggtgcaaacatatatatcaatgattataattaatttatacaatgacgagtataattgtacccaagttgcatgccataatatttgtcaaaaacaaaaagttgtatgccataatcaatccaggttgctagataataagatagatatgaatatgataacataaaatgctattaaagcaacaaataaacaataacacatagtccttatagggttcataattgatcgatgaacctagctagacgttgattttaggttaatttccagcgaggataaaatttattatataaagaaataactaaccaacacaaaataataaaaaattaaaaaaaaacgaagaaacttattttagagatataatttgttttagtatttgattgtaatttgagagattagctaggctctcaccaagtgagatctagagtatattcttaagaaaatatttataataaagaacccttaaacattttgcaaaacaaagggtggaattaatattaacaacaataattataatatcttgaaaattttatgaaaataatatatatatatatatatatatagagagagagagagagagagagagaaaattctcacaaacaatttttatctgttatttcaaattggtgtatgactccttagtccttagttcatttgtttgcacccagtcctgtcttaggtagttgattttatagttaggtaaattaatttctcgcactcttcgcttgattgtcatttatgggttgaactgttgaagtgattttatattttttaataaatttcacctgcaaaaaaactcaccattagcatacgccccccccccccccccccccccctctcccaaaaaaaaaaaaaaaacgaaagaagattaattagaaagaataaggtcgtgaaatgatgttacaaataaggcatatcagaatcagacgcaagggaagaataaaaacgttacaacaattcgcgcacaatgcaccccaaaaaaaaaatgacaggcacacataccttaaggaagaagaatcaacgctttca

SEQ ID NO: 257 - DNA, 5646 bp, Artificial Sequence
  Synthetic polynucleotide
ataaatggtagaaatctgtgggttcaaatgttcaattgctggggatcttcgtgatcatgatgattcatacacaatctctagaaacacgtacgcaaatattaattaatcaatttcctttttatagtctcctcacaattcacatgaaacttcatactctattatccgattccatttccatcgtatctttgaatttgacatttgtttgcccaacatgtaattaactttcccttctcatcttaaagatgtaacatgatatatattataacttgtaattaacccaatatttttaactctctatttttacactcatctgacatgtatttttatttttcatttttttttcttatcacatcacctcttacgtgtacaatttttctctttttcttatttctgtcttccataatagtaattaatattcatcggtccgatatgtatacagcccaaaaaagtgtgtaaaatcatttttgtatttctaaccctctctttctcatgcaagctagcttcttctttctatttatagcccttctcccttcacccaccaacacaccacaactccaaactttttcctcttgttctcttcttcttcaacacaactagtcataatccagctcatctctctctccctctctctttgttctctctttctctttctccaaaatggctctaaactacccttttttaacctacttcatactactgctagttggcttcaagggactatggccatttaacgcatgaattcccattagctgtgtttcgtccatcttctatagatgacatagtcaccttgataaaatcttcgtacaatagctttgccccttttgacatagctgcgaggggccaaggccactccactcatggacaagccatggctcgtgatgggattgtggtggacatggccagcctaagaaaacaaagaaatggggttgcgattagtgtctctaaggaccctttgatgggtcactatgctgatgttggaggggaacaactctggattgatgtgctacatgccacacttgaatatggacttgcaccagtttcttggactgattatttgtacttgaccgtgggagggacactttctaatgctggaatcagtggccagagcttccgttatggacctcaaatcagcaacgttcatgaaatggatgtcatcactggtatggagttagttgttttttttaatcaataaatgttaatattattagcttgttagttttttttgaaaaaattgaattaactttcgtttcctcttttctttctttttttaaccacacaattaatctaataactactggtattaagttagtttattttccatttttcatatataagttaggatttctaattaaaattgacatttcgtaccaccactacaaaaaaataatgtatcagtggcacaaaaaaatatattggcatcacttgtttttttagtcattaatattttgtagcatcacaaaaaatatggtgacaagttttctaaaaattacaaattaactgattcgtcagtgatgttaatgattttttagtgcgtcttggcaactaatgttttcatcttatataaaattagaaacaatagcggcaacagcacctgacattgtgtttgtgttttgcgtgtttctatcgcctaatttttgttgagaacgtgttcgtgaaacttggaaaaagagaaaattgaaattttcttgagatatctaccacttaagaaaaacaaatggctgtttccgttttgtctcttatgacatgacatggtacgtcatagatgaagttctgctaaatatatttgatatgatttcttgaacacgttttatatattcccacttcccagttagtgtggttgttgaatctaattaaaacaggaatagtctttgtctacaatatgggtgagcgatgcaaactttccaagggtttagaagttagaactatataggtccacggtcataattttatattcttgattaactttatgttggttaagtcgttcatatttggtcaattcattcatatgagaaaatactgaaatacaaacatggaaaaatgttaattactcttataattggcgcatgcatgcatctaaattatatgattttaataaatagtttttgtcatctacttgatttcaggaaaaggagagttcgtaacatgctcttcacagaagaacttggagttattccacgcggttcttggaggcttgggacaatttggagttatagcaagggcgagaattgctcttgagccagcacccaaaagggtacgtttatagagaattgactagaattttgtcttgtagcttttcctccaccaattcatatagtgacacctaatcgaattgtcatttttttttacggtgaattgtcattttgtaaatctaccaagtggtagttggcacccatatatgtatgaactatagtaccatacatttcattttatgttggtgtgttagtcatccatgatgaacacatacacaaatgaaaataggacgagttatacgtacgtaagggtttgaatcactgaatgtggatttttgaagttgaaagcatattaatcttggtttgaaaaagaaaaaaaaaatcggaagtccctcttgaagttatcatgactcttatattaagccaatagaattagaaaaactataattatgaatgatcatgttaattctttcagtgacttaaaatcttatctacaaaaagtacccttttgaaaaagaccttcacttaagtccatgcatacagtactaatcttacatacttgagagttgagacttgaagcatgaggagatttgaagtctggagaaacaagccaccacatattaattactaccgtattcttatctttatttatccttccaattttgatgggactggttgcacatacattcatacatactaacatacataaatacgtctctctctcatgtatttcattttattatattctatttcgttagtaagtttactagtataagacattattaatggtgaatttttgttggcatgcaggttaagtgggtcagactactttatagtgacttttctgcttttaccaaagaccaggaacgattaatctcaatcaatggaaggaaacaaaagaacgcattggattttctggaagggatgctgctaatgaaccaaggccccataaataattggagatcctctttcttccctctatctgaccatcccagaatagcttctttaataactgaacatagcatcctctactgtcttgaagtggctaaatattatgacgaacaaaccgagttaaatgtggacaaggtaacctcgtctagtcatatctattatatatagttagatcttgtcacatttctttgtttaaaaaataaaataaaaggcacaatcccaaaaagtcaaaagcaaatgcctagatattgtgtgttttcttggatattaattattacaccttaataacccataataatttttttatttttctttgtctctgtaggaaattgaagttttgctccaaggactagcctatatccctggatttaattatgagaaaaatgtctcgtacgttgagttcttgaatagggtccgaagtggagagttgaaacttcagtcacaaggactgtgggaagttcctcacccgtggcttaatttgtttataccaaaatctcaaatcttggattttaattcaggagtattcaaagatatagttcttaaaagaaacatctcctctggaccagtcttggtttatcccatgaatagaaacaagtaagccttgaatgcatgaatcacaatctagtgtcattataattcaggagtgtgtgatgcaatcttttaattttctgaccattcaactcaatatcaattttatttcttttttcaattaaaatgcaaaagagaataataattaataatatgaaatttaattccaggtgggacgataggatgtcagcatctataccagacgaggatgttttctacacagttgggtttttgcactcaagtgggtttgatacttggaaggcatatgatgctcaaaacagagaaattttggagttctgtagagatgctggcatcatggtcaagcaatatcttcccaaccacagcacacaagaagattggacaaaccattttggtgctaaatggatgaaattcttagaaagaaaacatcagtttgatccaagaatgattctatcacctgggcaaaaaatcttccacaaaaaattacagccagtgttttaaatattttccctaataaaaaaagtaaaaatgttttgtggtgggactacctcaattagatggctagctagggacaggtgtacatacagtgtgaccaagaccaagatggcttttgtatgctaaagtttgcattgctagctagagaaattaataaggtggggcattaaaggctgcatgagtacttttggcacctattatgctacatattaccttagatacgttaggttgacaaagtcgtactggtaggtacaagaagcacagttgtctctcacactgtctgtcacccaacttgctatatagtgtgtggagaaattcggatcatattgaagatgctgtgagttatagtcctccaatattaaatgtttaacgattctgtctttctcttatataattttgttttgcattatattactttcgcactggtgcaaacatatatatcaatgattataattaatttatacaatgacgagtataattgtacccaagttgcatgccataatatttgtcaaaaacaaaaagttgtatgccataatcaatccaggttgctagataataagatagatatgaatatgataacataaaatgctattaaagcaacaaataaacaataacacatagtccttatagggttcataattgatcgatgaacctagctagacgttgattttaggttaatttccagcgaggataaaatttattatataaagaaataactaaccaacacaaaataataaaaaattaaaaaaaaacgaagaaacttattttagagatataatttgttttagtatttgattgtaatttgagagattagctaggctctcaccaagtgagatctagagtatattcttaagaaaatatttataataaagaacccttaaacattttgcaaaacaaagggtggaattaatattaacaacaataattataatatcttgaaaattttatgaaaataatatatatatatatatatatatagagagagagagagagagagagagaaaattctcacaaacaatttttatctgttatttcaaattggtgtatgactccttagtccttagttcatttgtttgcacccagtcctgtcttaggtagttgattttatagttaggtaaattaatttctcgcactcttcgcttgattgtcatttatgggttgaactgttgaagtgattttatattttttaataaatttcacctgcaaaaaaactcaccattagcatacgccccccccccccccccccccccctctcccaaaaaaaaaaaaaaaacgaaagaagattaattagaaagaataaggtcgtgaaatgatgttacaaataaggcatatcagaatcagacgcaagggaagaataaaaacgttacaacaattcgcgcacaatgcaccccaaaaaaaaaatgacaggcacacataccttaaggaagaagaatcaacgctttca

SEQ ID NO: 258 - DNA, 5910 bp, Artificial Sequence
  Synthetic polynucleotide
atttagcatccctccctttgcacaatgtacaatttgggttttgaataatttttgtcacaccttcatttcgtgggactacttctctaatctatacccatcctggtgaaaaataaagggagcgagttacttacttaattaaacatacttaagtttctctctgactctctctcctctttttaattaatttatcataaacaaatatgtgtgcgagtattaaacccgtgcaaaatattagtattattgtttaattttttttccttctcatcaatcataaatatactttttaatacaaaataaaaaatagttaactcagaagatttcttcacttaatcacttcgattcaatattaaaaatcaatccacgctttgttgttttttttcccatgacttatcacgtacatttattatttattatttttctgatgttcttactataaagggaatcactatttgtcacacacaaaactataaagggaatcaaatgatcaattcttatttaaaaactctattaattaaaattacaattacaacaaaaccctaattttatcctccttataattaaacctccacattctctctctctctatcaatacatgtgtttctcaaattaaatattttccatatcctccttttatcatgcaaagtcctcttccattctatatatagcccctacctcctccacctcctttccccactacaacacacaccaacaatcaaatcaatccatccaacctagacatctctcatcttctccaaattaacaaaaatggtagctgggaaatacccttcccccacatacttcatcctcctgctcataaccataacacgtttgatctccacagtgggcaagacctcccaatggccctaacgccgcctccggaactcgcctcggtctccctcgatgacaccatcttcagcaagctccgcaacgacccagaggccctccaggggagggcctccagggactacgggaacctcgtccgcgaggttccctcggcggtcttccacccgacctcgtcgagcgacatcgcgaggctgatcaagctgtcgtacaacggttctgtccccttcaagatagcggcgagggggcaagggcactcgacgaggggccaggcgatggtacgtgatggggtggtggtggacatggccgggttcagagagagagggaatggagagggaataagggttgtgatgagtgttgttgtggaccctaataataagaatggttatggttactattatgctgatgttggaggggaacagttgtggatcgatgtgctaaacgccacgcttgagcatggacttgcacctatgtcctggactgattacttgtacttgacggtgggaggaactctctccaatgctggcatcagtggccagacattccgctatggtcctcaaatcaccactgtccgccaaatggacgtcatcactggtaagacaactttcaatttattcagttaattttatcatataattttaccaaatacttataaaccatatcagaaacttttaatttaatcaactaactcacaattagtttaatcatatacttttaatttaatccactaacttataaatttgtaacttttcagcttggaggtttgtaggttataagtctcaactttccactaacttataagttagttttagttttattgtatgtggtacttttgaaaattcaaggattttggtactataataactcgttcaactgttggcttagtatcaaaactcttggattttcaagtgtacttcaacaaccatcttaatttaattgatcagggttttaatattgtgaaaattggtcattggacaacttggaaagtgacacagcttggaaaagaaggaaagagggagatgggaagggaaaagaaagaaaataacttttaaaattagttgcgtgaaaaaattaaggttgctgaattaaattatggttcaccacgactctaattgtggcaacccaacgtgccgtggttgtggatattttcagaactttattgcaacttcggttatagtggcgtttgttcaattcattttttaatgtatcagactgtgattgcgattgaaattttataaaatctttttttttttaaacttgttcttttgattaggattaggaatttcagaaacttgattctatttcatatacttttttttaatgtaataccgaattagtggttgataaacgagtctttgtctacaaatttggtgaatgttagcaaccgctttccatctggtcccatgcttgaaaattttcttaaccatggaaattagttcacacggacagtcatagccttcaattcttgattaattgtttccttttctaaaatatggtgatactattatattattggtccaaggtcttgttttggtcaaatttttttattagaaataaacgggctgctgaattttaatttactcaagtgtttcttaaagaatatgtatgcatgcatgcaattatatattattattattatcattactgttatgtttaatcaagtttaatttggtttggttcaggaaagggagaatttgtgacttgctctcagcagacgaattcggagttgttccacgcggttctgggggcttaggacaatttggaattataacaagggcaagaatcgctcttgccccagctcccaagagggtacgtttaaaatcttcaagaattgactaggactttgtcttgttgcttcttcctccaacatctctcacatagtaacgccaatttctgcatatgttacattattaattcaaccatcaagctttagggaagcatcaaatgtccttgtcctaaatgctttatgtcatcatttttcttggcaccctttcgtttcacattgtgttagtgcatattagtcatccatgaaagacacatgaaaataaaatttgttggaaaaatataaatcatattttcataagtcttttgaaatatacagtaaccttagagaccttaagcaattaagccaataaaaagggtcgtattatcaaaccccaactaacaactattagaaaatactaacaagtataggtgcatacataaatatgtttccactagaaagtatataaagttggtgagatgattcattttgaattttagtaccttaattatttaactttatccttctatttgatgggactcatcgcataagccatacatatatacataatcatgcgttcattattgtttttcattatgagttaatgagttgattgtatgaactaatggtgaatttctcattggcaggttaaatgggtgagacttttgtacaatgacttttctgctttcaccaaagaccaggaacaactaatctcaatcactagaaggaaacaaaatattgcactggattatttggaaggattgctgctaatgcaccaaggacccataaataattggagatcttctttcttccctttagccgaccatgcccgaataatttcgctagtaactaaacacagcgtcctctattgcctagaagttgccaaatattatgatggccaaaatgaaaacaatgtggacaaggtaccgtctccattcatgtgcatttgccttcatgatgtgtcttttatttcttttcttttaattttttgtctcaccttatataataaccctttgtcacactcaatattattatatttttaaagagtttaatggttatacactatttttactttatttaattataaattatcattgatatattttttaagataattatcataaaagttaataaatttatcagttataattgaatgattgtataaaattatttaatttatattgcataatttattttctatttgtaatctttttttactataagttgttatattgtaagtaattaatattctcattttcatgattgtgtaggaactcaaagttttactacaaggactgagctatatccctggattttactatgaaaaagatgtctcgtatgttgagttcttgaatagagttcgaagtggagagttgaagctacaatcacaaggactatgggatgttcctcacccatggcttaatttgtttataccgaaatctcaaatcatggaatttgactcgggcgtgttcaagaatatcatccttaaacgaaacattaccacaggacccgtcttggtttaccccatgaatagaaacaagtaattgagcttaactaactaatctcaatttgtattgttatcattaggaaaaatgttaattggtacgaaaactatatactacactattttcattaaaattcatgaaagtgaaatttctctttcctaaaataacttctttctcttaaaatgaatttttgtttttctcaatctccatcaattacttatttccttttttgaacgtttgaaaagtcattcataacttttttttcataaaaaggtcatttcgtaccaattaaatagcattgcctttattatcatatgtacacaattcttctcttcactcacttctctctttttttttcccattaaaattgtaaaacaaataatcaggtgggacaataggatgtcagcatcaatacccgacgaggatatcttctacacagttggatttttgcattcaagtgggtttgataattggaaggcctatgatgctcaaaataaagaaattctacaattttgtaacgattctgggatcaaggttaagcaatatcttccccactaccgcacacaagaagattggacaaaccattttggccctaaatggaggacttttgtagaaagaaaacaccagtttgatccaaaaatgattctatcacctggacaaagaatctttaacaattaaactagctttaaaaaatatatataatatggtgggactacccaagttagctagctggctgatctcaagtgtacacataggacccagaattcagatgatagcctttgtacttgtttttgttaagagggtggggttaaaagctgcatgactttggcatatatgtagatcaggttacacatactttagatacgttaggttgacaaaatcatgtgtgaaagatgcacacagctagctgtgtacctttctttctctctctctctttctttctctctgtccctcaatttgtctatcactaaaaagattactatagtttagaacctagtgaagatggaaaaaaatcattatatagaggatttaattttatcacacgttctaatcatatacattaatattcttaaatgtgcaatgagtgtgttcggtgccttaatgattctttatctttgttaattgttagtatattatagggttttgtttttcccttcctaattttgtaacggccatccctactagcaataattgagatcctaggttaactaaggaagagcattattgtgtccaaattgagagtcctagctgtatgccataataataaatcatcgtaagttgctagatagatgtgataacgccaaatgccttcaaatactattattaatctccatcgcgagatccttcgttgtgattatgtagaaaagattacgctgcttttacaagagaatactccaagaaagcaagtgattgctccttaatataagaatcatacaataaacaaatggtgttgtagtccataaagtgtatttaatatttgatgaaagagtgtgtagacatcaaagtgataaaactaataaatttaagtttgatgcaattcgaagtcgtagatacttaattaatctctaaatcatattagttttaaaccatacagattttaatatgttgaatggattaatctttaattgtgcattggaaaatattataattcataaaaaaagaaataaagtttagacatgaataattacggactaatgaatgcaacctatatatactacgtctctcaattttgcggagaatttaggaatattatagtatttcactgaaaggacacacaagtggcaatgatgaatattttaattt

SEQ ID NO: 259 - DNA, 9709 bp, Artificial Sequence
  Synthetic polynucleotide
ttaaaaatatttaaagacttaattaaaaattattaaatatttcagagatctataaattaatttaacataaatgaaagtgttatcaaatatgtctagctaattgaaaaaaaaaaacttaaataaaaatttctttttacctgtcttattaggtgactaaggatataattgataaacaaaagtaattaattaattataagatctttaactttataaaaaataaataaaaaaatcttttaaaaaaaattcgacaattaaaaagaaattaacagagggagtaacaattttttacattaaaaaataaatttaaaatttgagtttaacggtcgtattatcatttagtgataaattatcgatataaattttaagataattattataaaaattaataaatttattatgataatttataattaaatcaaaatataaaattatttaacaccacgtgcataataatctaattcacaaaaaaaagaggtaatttatatagtctcttttattaccttatttttctgagtagtaataaatagacaccaagtgttaataataaagtttatcctttctcctcctatccgtctctttatttatttttcattacaaactttatcaaatctatcaatttctctctcttctatctttctctttgttctatccatacaacttaaaaatgtggttgtagtctaaaattttgcctctaattactgtctaccgcggtgtacttgacctgtacaattacctttcagatgctattataactagagaaatttagctcaagacttaaaaacaatggaccaagagatgtgctgtttccacaatgaggcacgtgtctcctcggtccagtcacgtgaagatccacgtgcctttactctgagcttgagccttagtagtttttcgtggttctctccctgtcctataaatttgagagcctgtatcttacatcctagacacacagtagtgactagctcattcattacaattcatcaccccagccaccaacccttttttcatgccaaaccacgaatttgcttctaattttcatgccaaaccctttcttctttcttttgagagagacgcaatccgctcctctatcttactggctagatcaattcctttctattaatttgcttctttctcaatttgtacatgccttcgatcttatagacatacatatatctcctaaactgcacatagagatttaaaaaaaaagaacaagttacaagtagaatttttttggcaagaatcgaagaaagtgagtgagagaaaagaatcttcatctttctgcatgttgcgtacagaatctttaaagccaaatcctgctcacgttaacccacgacgctgttccaagattttgttctcttctctggagcttcccaacattcttcctttccctcatccaccacccccactacccaataactcatcatcatcgtacgccacacacatgacatgcatgtatcttcattaattccttagcgaaaccacacgtactctagcttgtggggtagtttttaattattagttattcttatcttgttcaattcatggctgtcaacaacaacaagcttgttctgttaacattcgccatatgccgtttaatagtaactgtgggattaacggtggtcccggagctgctcgatgtgggactccagggtcgtctcagcgggaggcggcttcggtggatttcgggaggctgagtcgaggggagccttcggaggtagtgcaccctgccacggcggaggatgtggctagggtggtgaaggcggcgttcgagtctccgttcgccgtgtcagcgagggggcacgggcattcgataaacgggcaagccatgataaaagagaagaaaggagtggtgattgaaatgggaaaaagtgatagtggtgaggatggtagtagtattagagtgagtgagaaaggaatgtatgtggacgtgtggggtgggaagttgtggatagatgttttgagtgcaacattggagtatgggctggctcccatgtcttggaccgattacttgtatttgtctgtgggtggaaccctatccaacgctggaattagtggacaaaccttcaatcacggtcctcagatcaccaatgtttatgagctcgatgtcgttacaggtaatttaatatataatataatttgcattcacttttaactaatcacaaatatcattattggtatacttttttaaggtacaatttttgcattcacggttaatttttacaataatagtactatgtttaacatttgacaccttcaaagagaaaaaaaggagttctaccattataaatgattctaaagatggatttatattttcgaaaattaatgtttattatatacatttttaaataatttaaatttgttggtgttattgttgccaaatttgattgttttaccgtaagaaatgatgcttgtgcatgctaataactagttgttcttgttccccaagaggaaaagttaattttcactaattaaacagaggtgtcccactggtttgtcatggtgctgagtacaaacgaatctcgtttatctttagcgtggttaatctcgttgatatcataatgtgtactggtgtgtaacaggaaagggtgagctggtgacatgttcagaagatcgtaactcggagttgttccatgctgttctaggtggtcttggacaatttggaatcatcacaagggctagaattgctctcgaaccagctcctcacagagtgtgtatctctcccacgtactttatctttctttgtctctttttcttactcacacatatacagtacccaattccctctttcctaattgtatgactctcttttcgtactagctcgtgacctcgcacataatatgctaacatttcatgtaataattgaagataaagttataaaaatgaataatattatctgttttcataatgcatacatatacttcatttttattttttagaaacaactcaatgtaaataaaatttaaagtgtaaatattatttctttttttccatcatggaaaaaaaaagtcggttgaacatgatttccatgagatgataggaggggcacacacgatgcgtcttttcttggaaatctttcttcacatcagcgacaaaacctaaaaaaagggtcgttttcgaagggatggtttgggtactcttctaacaatataaagctggaataattatcgtttgcgtgtcgcctgcctgggacattctctgttttaattcatttctcttaacgaactaatatcactatcgattaagggaactgatatcaatgagctataacaatagaatattctcgtctaattaatattattagggtttaatttctatttactgtaaattaatattactataagaaattttacattttcaatcaatcatacatcatcgtggtggtataacttttaaagtgataattactataaaaaggaacatatacttctcatacatgtttatttataattgagagattagataaaatttgtttacacgttcaatagatatattattttctccaataaaattatattagagttagatatatgataaatatttaagtgcaggttcggtggatacgagtactgtattcgaattttgcaaggttttgtaaggaccaggagtatctgatatctctgcatgggaaagcagcaagggagagattcgactatgtggagggtttcgtgatagttgatgaagggctgatcaataattggaggtcttcgttcttttcagctagtaacccagttaaaatcacttccctcaacgctgacggaggtgttttgtactgcttggagattaccaaaaattacgaccaaggaaacgcagattctgttgatgaggtacgtacacacccaatcccacgtacattttctcttctttgtcagtgccttcacttatatataatattattgactgttcatacacttagtgcgctgtcacaataaaatatattcatttaactttcattagtttaattatgtgaagttaccttatttcgtttactaataacgtgttcatatcttatttattgcgtactccacttcgtgtacacattataattgtcattttttatcattttacaccaagaaaataataaataaataagactaataataattttataaaattaatattttattattattaattcatttataaattttgttatttataattaatatgataagcgatataattaaaaaataataattaatgttacatttaaaaattaaaatgataattattttgaaatatttttttctcttgtatgacagttactttaatgttgaagaaaatttagatagaattaaacaaaatgattggacaaaataattaatatattaaagttaaaattaaattatttcagtattatttaagtttgatatttaataaaaataattttttattcgattttacttattttttgattgaattctagattagttgagattcaatttttttaatgagttggagggataggaaaaaaatagttagatagaattaattcttgaaagagtgaaaaaaaaatacattgaagcttttttttattgaaacgtgtaagaatcgagattctaacaaaaaataaaacagggcttaagtagttaagtttttaccaaaatcactccacctagctagctaatgttgcctgtttaatttactttatgtatttttatttttttttcggttacatccatttgtttaaaataattgtttctcaaatatgctacttgatgtccatgttgttcaaattctaaactctagaaaagacatgaaatataagtatgtgtcagaataattaattaagtcttcgggctttttcgtccagtttttgttagttggtcaacacatttatgcttcagagattctataggatttatagggagcaaaatataaaattaacaggcaaacataaaaggacaaaattaatggcgttgatttgaacatcaattaaaaagtaacattgatattcataacaaattaacagacaaatgtgaaagaacaaaaatagcattattcaataccagttgtttttaccacattaaatttgaacgtttagttttgagtcatctgtcctttctctctttatcgttctacccttgagaagatcaacggaagaaatatgtcaattattctgacgaatactctcatatgattatgcgattaatgtcaagattttcttcgttcacaaattcatgcttactttaataattcagtatctgtctgttttatgtttgaagtctgatttaatattgttaatggtatctttaagtaattggtcaaacaattcaattaacaagaaaaatgatatacgctgtccagaggtaatcacattttatttaatttcataatttattgaattaaaaccttggttcttccttcatcgctgtcctcgtatatgattattctctgtacccaaacattgaccagtctctagttgtagaacagaatgcaataaaacatacaaaagaaaacatgtggaagatcttgtgcaatctatcatctcgattcaatcgcaagattgaatgcaacctttacaatagttaattttcactgtttaaaaatgccggcagtccaccagaatattctctcacttgtttttaacttctcttaattaattcttgtcaaagctatatataactgctcacaatagtgggtctcatatcccgacaaaagcaccggctaccttagctagcagctttcctttttcatgcataactatttaatttaagacctagagaggaaaaaagagataaatatagtttaaataagtgatatgatgttatagaaaaataaacataaaatatgttactagagtatttcatttatatatatatatatatactccacttttataaatatatttaaataaatagttatttgtattttgatctactagaatgacgtatgagagatttttttttaatctttaatttttgttattaagtacttatgtttttaaagttaaacaaagttagtctttctattaatattctttacaaaacgtcaaaacctttaagttcattttctgtttaaaatatttataaattatatctattacattatttaaatactttttattcgaagcataccaaccgaaattaaacatcaaaagacattttcttagatttctctttgtacgtttttatggtatgcaggaaatacaagctctattgaaaaagttaaattttataccaacatcggttttcacaacggacttgccttacgtggattttctggatcgtgtacataaggcagagctgaagcttagatccaagggtttatgggatgtacctcatccgtggctcaacctttttgttccaaaatcaaggataggggacttcgacaagggtgtgttcaagggcattcttggaaataagacaagtggacctatcctcatataccctatgaacaaaaacaagtaagtttataaatatatatttccgcatgcatatccatttgttatactatcatattcatccatgtcctagtcatatatatgtagaataaaaccactgcatgtttgcaggcatgcacatatctcctcatatataaaccacatgtctgctgctgatagcctcatatcgactgtcagtgtttagggaagaagaaaagaaaagaaaaagttcaaatgagtaatgaaatagagtatgaagttttgtgatcatatatgaaagagaaaaacctgcaacataatatatattttctacaacgaatattcccaataattatggaactagatgaaaatgtgtgaagattctccacgattgatggacagatagtactattgtcggaattaatggattagggaataaacagaatctagacgtttacattaatcctaataatagatggctgaatctgtttgtttctactttcattgtgtgtattaattaatccaggtcctcgataattcttgaattaaagaagattctgtttgataaatttgtctacacttaattaaacactgacaaaaaaaactaaaatgaattaatttatttttataaattaaaatttacatctcaataaaatattagctatagataacttaaattaagaatgcttaatccaattaagtgaaaataaaaaatatgaaaagaacaagaagcacagtgaggtgcatgtagtggaaagacatggaagacacacgagggttgtattgtagccaacatagcagatgaaaatctgcatcaaagccagctaggaagtgccacgtttattatttcttgaccagaagcaaacaaaatggatggccatgatcatccaactggagagattctggtgtcagaagatcttccatagggacccactcctcgaatggtagggatgtctcctctccactcctcaccttttatactaacctagttccatagacaccgccatatgcatcaacttccaggtcaatatcaatataatatgcacaaataaacaaataaaaaccataataattgcacttagttatgttttttttttttcattttaaaaataccaaaaattaatgataatgatatcacaaataaaaataaaaatgcatgtttgttagagggtatataatataagaaagacaacgcttgtccaaagcatttatatatagagagagagaataagataaaaaattaaatgaattctatgtatcttgccataggtttctgactgataagtcgatggattattaatgtttttgaattagaccacgaattagaaatacttaaaaaagttctattgttatttcaacagagtagtagtaagtaaagtaaatggtttcaagtgtgcagtatagatgaatagaaaaattcaaaagatgattttgggcgatggtgatgtgtaggtgggaccagcgaagctcggtggtgacaccagaagaggatgtgttttacctggtggcatttctaagatcggcattggatactgagacgctggagtacctgactaatcagaaccgtcaaattctgaaattctgccatgatatagagatcaaggtaaaacaatacctgccccattacactacgcagcaggagtggatggaccactttggtgataagtggacccagttcaatgctaggaagatgcaattcgatccccgccgaatcttagccacaggccagcaaatttttcagtttcatccctcactcaccctcaatatgtagaacaaacatgcaaaatggataaataatcttgggttcatgttgagtagcaagtgctgtattattgtaattaggaaatacaaggaggatcatggcaaaaaaagaattagaaggatgtagttgtagtgcactagtgaaggatcaagagttgttgaggtgttgttatctgagggtaataaaattgatgatggagttggatttttgttatgtaatggggtcttgtagcaaattaagtaaggaacccaataaggattaggcccaaagaatataaggagtggtggggcccgctttggaggaggaaaagggcaatgcgcaagtgcacatgagcaccgcccgtctggtttggctgtctcgtttttcaatatagatatcttttattacccatccaaattcctcgtacatataattcttctagatgtattagtctgtatgtttatttcaaatggaaacatttaatcagtgactccttataaaacataatcaacggcatttatgaataaagttaataagttaagagggaaaggaaagaggagaggaaaatgttcaaatgaatcaaatttctcccattaacatttttaataaaattaatatttatcgataaaaaaaatatcaacaagttaagaaaataataataatagacatgtattgctaatataaaagtttccgtacacaattaattaattagaaactatcttaaatatcacttttaacaaagtaataatataaatcaataacataactttttttttatcactataatattaatgtgacatatttgtctattttgagaggttggaaacttggagacgagctctagaaacacatgactttcgcctaaacagaagcaaatcggagtatatggaatgtaagttcaacaaaagtaagagggtatctaactcagatgtgaaaatagaagaccatattatccctcaagtcacacagtttaaatatcttgggtctgtaatacaggatgatggagaaattgaaggggatgtgaatcatcgcattcaagcaggatggatgaaatggagaaaagcatcaggggtgttatgtgatgcaaaggtaccgatcaagctaaagggaaagttttatcggactgcggtaagaccggcgattttgtacggaacagaatgttgggcggtcaagagccaacatgagactaaagtaggtgtagcggagatgaggatgttgcggtggatgtgtggtaagactcgacaggataaaattagaaacggagctattagagagagggttggagtagcgcctattgtagagaagatggtggaaaatagacttaggtgatttgggcatgtagagagaagaccggtagactctgtagtgaggagagtagaccagatggagagaaggcaaacaattcgagacagaggaagacccaaaaaaactataagagaagttatcaagaaggatttcgaacttaatgatttggatagaagtatggtacttgatagaacattatggcagaagttgatccatgtagccgaccccacctagtgggataaggtgttgttgttgttgttgtatttgtctattttattaatgattaatttctgttggagaacttaatt

SEQ ID NO: 260 - DNA, 9718 bp, Artificial Sequence
  Synthetic polynucleotide
ttaaaaatatttaaagacttaattaaaaattattaaatatttcagagatctataaattaatttaacataaatgaaagtgttatcaaatatgtctagctaattgaaaaaaaaaaacttaaataaaaatttctttttacctgtcttattaggtgactaaggatataattgataaacaaaagtaattaattaattataagatctttaactttataaaaaataaataaaaaaatcttttaaaaaaaattcgacaattaaaaagaaattaacagagggagtaacaattttttacattaaaaaataaatttaaaatttgagtttaacggtcgtattatcatttagtgataaattatcgatataaattttaagataattattataaaaattaataaatttattatgataatttataattaaatcaaaatataaaattatttaacaccacgtgcataataatctaattcacaaaaaaaagaggtaatttatatagtctcttttattaccttatttttctgagtagtaataaatagacaccaagtgttaataataaagtttatcctttctcctcctatccgtctctttatttatttttcattacaaactttatcaaatctatcaatttctctctcttctatctttctctttgttctatccatacaacttaaaaatgtggttgtagtctaaaattttgcctctaattactgtctaccgcggtgtacttgacctgtacaattacctttcagatgctattataactagagaaatttagctcaagacttaaaaacaatggaccaagagatgtgctgtttccacaatgaggcacgtgtctcctcggtccagtcacgtgaagatccacgtgcctttactctgagcttgagccttagtagtttttcgtggttctctccctgtcctataaatttgagagcctgtatcttacatcctagacacacagtagtgactagctcattcattacaattcatcaccccagccaccaacccttttttcatgccaaaccacgaatttgcttctaattttcatgccaaaccctttcttctttcttttgagagagacgcaatccgctcctctatcttactggctagatcaattcctttctattaatttgcttctttctcaatttgtacatgccttcgatcttatagacatacatatatctcctaaactgcacatagagatttaaaaaaaaagaacaagttacaagtagaatttttttggcaagaatcgaagaaagtgagtgagagaaaagaatcttcatctttctgcatgttgcgtacagaatctttaaagccaaatcctgctcacgttaacccacgacgctgttccaagattttgttctcttctctggagcttcccaacattcttcctttccctcatccaccacccccactacccaataactcatcatcatcgtacgccacacacatgacatgcatgtatcttcattaattccttagcgaaaccacacgtactctagcttgtggggtagtttttaattattagttattcttatcttgttcaattcatggctgtcaacagcttgttctgttaacattcgccatatgccgtttaatagtaactgtgggattaacggtggtcccggagctgctcgatgtgggactccagggtcgtctcagcgtggacacgttggaactggaggcggcttcggtggatttcgggaggctgagtcgaggggagccttcggaggtagtgcaccctgccacggcggaggatgtggctagggtggtgaaggcggcgttcgagtctccgttcgccgtgtcagcgagggggcacgggcattcgataaacgggcaagccatgataaaagagaagaaaggagtggtgattgaaatgggaaaaagtgatagtggtgaggatggtagtagtattagagtgagtgagaaaggaatgtatgtggacgtgtggggtgggaagttgtggatagatgttttgagtgcaacattggagtatgggctggctcccatgtcttggaccgattacttgtatttgtctgtgggtggaaccctatccaacgctggaattagtggacaaaccttcaatcacggtcctcagatcaccaatgtttatgagctcgatgtcgttacaggtaatttaatatataatataatttgcattcacttttaactaatcacaaatatcattattggtatacttttttaaggtacaatttttgcattcacggttaatttttacaataatagtactatgtttaacatttgacaccttcaaagagaaaaaaaggagttctaccattataaatgattctaaagatggatttatattttcgaaaattaatgtttattatatacatttttaaataatttaaatttgttggtgttattgttgccaaatttgattgttttaccgtaagaaatgatgcttgtgcatgctaataactagttgttcttgttccccaagaggaaaagttaattttcactaattaaacagaggtgtcccactggtttgtcatggtgctgagtacaaacgaatctcgtttatctttagcgtggttaatctcgttgatatcataatgtgtactggtgtgtaacaggaaagggtgagctggtgacatgttcagaagatcgtaactcggagttgttccatgctgttctaggtggtcttggacaatttggaatcatcacaagggctagaattgctctcgaaccagctcctcacagagtgtgtatctctcccacgtactttatctttctttgtctctttttcttactcacacatatacagtacccaattccctctttcctaattgtatgactctcttttcgtactagctcgtgacctcgcacataatatgctaacatttcatgtaataattgaagataaagttataaaaatgaataatattatctgttttcataatgcatacatatacttcatttttattttttagaaacaactcaatgtaaataaaatttaaagtgtaaatattatttctttttttccatcatggaaaaaaaaagtcggttgaacatgatttccatgagatgataggaggggcacacacgatgcgtcttttcttggaaatctttcttcacatcagcgacaaaacctaaaaaaagggtcgttttcgaagggatggtttgggtactcttctaacaatataaagctggaataattatcgtttgcgtgtcgcctgcctgggacattctctgttttaattcatttctcttaacgaactaatatcactatcgattaagggaactgatatcaatgagctataacaatagaatattctcgtctaattaatattattagggtttaatttctatttactgtaaattaatattactataagaaattttacattttcaatcaatcatacatcatcgtggtggtataacttttaaagtgataattactataaaaaggaacatatacttctcatacatgtttatttataattgagagattagataaaatttgtttacacgttcaatagatatattattttctccaataaaattatattagagttagatatatgataaatatttaagtgcaggttcggtggatacgagtactgtattcgaattttgcaaggttttgtaaggaccaggagtatctgatatctctgcatgggaaagcagcaagggagagattcgactatgtggagggtttcgtgatagttgatgaagggctgatcaataattggaggtcttcgttcttttcagctagtaacccagttaaaatcacttccctcaacgctgacggaggtgttttgtactgcttggagattaccaaaaattacgaccaaggaaacgcagattctgttgatgaggtacgtacacacccaatcccacgtacattttctcttctttgtcagtgccttcacttatatataatattattgactgttcatacacttagtgcgctgtcacaataaaatatattcatttaactttcattagtttaattatgtgaagttaccttatttcgtttactaataacgtgttcatatcttatttattgcgtactccacttcgtgtacacattataattgtcattttttatcattttacaccaagaaaataataaataaataagactaataataattttataaaattaatattttattattattaattcatttataaattttgttatttataattaatatgataagcgatataattaaaaaataataattaatgttacatttaaaaattaaaatgataattattttgaaatatttttttctcttgtatgacagttactttaatgttgaagaaaatttagatagaattaaacaaaatgattggacaaaataattaatatattaaagttaaaattaaattatttcagtattatttaagtttgatatttaataaaaataattttttattcgattttacttattttttgattgaattctagattagttgagattcaatttttttaatgagttggagggataggaaaaaaatagttagatagaattaattcttgaaagagtgaaaaaaaaatacattgaagcttttttttattgaaacgtgtaagaatcgagattctaacaaaaaataaaacagggcttaagtagttaagtttttaccaaaatcactccacctagctagctaatgttgcctgtttaatttactttatgtatttttatttttttttcggttacatccatttgtttaaaataattgtttctcaaatatgctacttgatgtccatgttgttcaaattctaaactctagaaaagacatgaaatataagtatgtgtcagaataattaattaagtcttcgggctttttcgtccagtttttgttagttggtcaacacatttatgcttcagagattctataggatttatagggagcaaaatataaaattaacaggcaaacataaaaggacaaaattaatggcgttgatttgaacatcaattaaaaagtaacattgatattcataacaaattaacagacaaatgtgaaagaacaaaaatagcattattcaataccagttgtttttaccacattaaatttgaacgtttagttttgagtcatctgtcctttctctctttatcgttctacccttgagaagatcaacggaagaaatatgtcaattattctgacgaatactctcatatgattatgcgattaatgtcaagattttcttcgttcacaaattcatgcttactttaataattcagtatctgtctgttttatgtttgaagtctgatttaatattgttaatggtatctttaagtaattggtcaaacaattcaattaacaagaaaaatgatatacgctgtccagaggtaatcacattttatttaatttcataatttattgaattaaaaccttggttcttccttcatcgctgtcctcgtatatgattattctctgtacccaaacattgaccagtctctagttgtagaacagaatgcaataaaacatacaaaagaaaacatgtggaagatcttgtgcaatctatcatctcgattcaatcgcaagattgaatgcaacctttacaatagttaattttcactgtttaaaaatgccggcagtccaccagaatattctctcacttgtttttaacttctcttaattaattcttgtcaaagctatatataactgctcacaatagtgggtctcatatcccgacaaaagcaccggctaccttagctagcagctttcctttttcatgcataactatttaatttaagacctagagaggaaaaaagagataaatatagtttaaataagtgatatgatgttatagaaaaataaacataaaatatgttactagagtatttcatttatatatatatatatatactccacttttataaatatatttaaataaatagttatttgtattttgatctactagaatgacgtatgagagatttttttttaatctttaatttttgttattaagtacttatgtttttaaagttaaacaaagttagtctttctattaatattctttacaaaacgtcaaaacctttaagttcattttctgtttaaaatatttataaattatatctattacattatttaaatactttttattcgaagcataccaaccgaaattaaacatcaaaagacattttcttagatttctctttgtacgtttttatggtatgcaggaaatacaagctctattgaaaaagttaaattttataccaacatcggttttcacaacggacttgccttacgtggattttctggatcgtgtacataaggcagagctgaagcttagatccaagggtttatgggatgtacctcatccgtggctcaacctttttgttccaaaatcaaggataggggacttcgacaagggtgtgttcaagggcattcttggaaataagacaagtggacctatcctcatataccctatgaacaaaaacaagtaagtttataaatatatatttccgcatgcatatccatttgttatactatcatattcatccatgtcctagtcatatatatgtagaataaaaccactgcatgtttgcaggcatgcacatatctcctcatatataaaccacatgtctgctgctgatagcctcatatcgactgtcagtgtttagggaagaagaaaagaaaagaaaaagttcaaatgagtaatgaaatagagtatgaagttttgtgatcatatatgaaagagaaaaacctgcaacataatatatattttctacaacgaatattcccaataattatggaactagatgaaaatgtgtgaagattctccacgattgatggacagatagtactattgtcggaattaatggattagggaataaacagaatctagacgtttacattaatcctaataatagatggctgaatctgtttgtttctactttcattgtgtgtattaattaatccaggtcctcgataattcttgaattaaagaagattctgtttgataaatttgtctacacttaattaaacactgacaaaaaaaactaaaatgaattaatttatttttataaattaaaatttacatctcaataaaatattagctatagataacttaaattaagaatgcttaatccaattaagtgaaaataaaaaatatgaaaagaacaagaagcacagtgaggtgcatgtagtggaaagacatggaagacacacgagggttgtattgtagccaacatagcagatgaaaatctgcatcaaagccagctaggaagtgccacgtttattatttcttgaccagaagcaaacaaaatggatggccatgatcatccaactggagagattctggtgtcagaagatcttccatagggacccactcctcgaatggtagggatgtctcctctccactcctcaccttttatactaacctagttccatagacaccgccatatgcatcaacttccaggtcaatatcaatataatatgcacaaataaacaaataaaaaccataataattgcacttagttatgttttttttttttcattttaaaaataccaaaaattaatgataatgatatcacaaataaaaataaaaatgcatgtttgttagagggtatataatataagaaagacaacgcttgtccaaagcatttatatatagagagagagaataagataaaaaattaaatgaattctatgtatcttgccataggtttctgactgataagtcgatggattattaatgtttttgaattagaccacgaattagaaatacttaaaaaagttctattgttatttcaacagagtagtagtaagtaaagtaaatggtttcaagtgtgcagtatagatgaatagaaaaattcaaaagatgattttgggcgatggtgatgtgtaggtgggaccagcgaagctcggtggtgacaccagaagaggatgtgttttacctggtggcatttctaagatcggcattggatactgagacgctggagtacctgactaatcagaaccgtcaaattctgaaattctgccatgatatagagatcaaggtaaaacaatacctgccccattacactacgcagcaggagtggatggaccactttggtgataagtggacccagttcaatgctaggaagatgcaattcgatccccgccgaatcttagccacaggccagcaaatttttcagtttcatccctcactcaccctcaatatgtagaacaaacatgcaaaatggataaataatcttgggttcatgttgagtagcaagtgctgtattattgtaattaggaaatacaaggaggatcatggcaaaaaaagaattagaaggatgtagttgtagtgcactagtgaaggatcaagagttgttgaggtgttgttatctgagggtaataaaattgatgatggagttggatttttgttatgtaatggggtcttgtagcaaattaagtaaggaacccaataaggattaggcccaaagaatataaggagtggtggggcccgctttggaggaggaaaagggcaatgcgcaagtgcacatgagcaccgcccgtctggtttggctgtctcgtttttcaatatagatatcttttattacccatccaaattcctcgtacatataattcttctagatgtattagtctgtatgtttatttcaaatggaaacatttaatcagtgactccttataaaacataatcaacggcatttatgaataaagttaataagttaagagggaaaggaaagaggagaggaaaatgttcaaatgaatcaaatttctcccattaacatttttaataaaattaatatttatcgataaaaaaaatatcaacaagttaagaaaataataataatagacatgtattgctaatataaaagtttccgtacacaattaattaattagaaactatcttaaatatcacttttaacaaagtaataatataaatcaataacataactttttttttatcactataatattaatgtgacatatttgtctattttgagaggttggaaacttggagacgagctctagaaacacatgactttcgcctaaacagaagcaaatcggagtatatggaatgtaagttcaacaaaagtaagagggtatctaactcagatgtgaaaatagaagaccatattatccctcaagtcacacagtttaaatatcttgggtctgtaatacaggatgatggagaaattgaaggggatgtgaatcatcgcattcaagcaggatggatgaaatggagaaaagcatcaggggtgttatgtgatgcaaaggtaccgatcaagctaaagggaaagttttatcggactgcggtaagaccggcgattttgtacggaacagaatgttgggcggtcaagagccaacatgagactaaagtaggtgtagcggagatgaggatgttgcggtggatgtgtggtaagactcgacaggataaaattagaaacggagctattagagagagggttggagtagcgcctattgtagagaagatggtggaaaatagacttaggtgatttgggcatgtagagagaagaccggtagactctgtagtgaggagagtagaccagatggagagaaggcaaacaattcgagacagaggaagacccaaaaaaactataagagaagttatcaagaaggatttcgaacttaatgatttggatagaagtatggtacttgatagaacattatggcagaagttgatccatgtagccgaccccacctagtgggataaggtgttgttgttgttgttgtatttgtctattttattaatgattaatttctgttggagaacttaatt

SEQ ID NO: 261 - DNA, 5763 bp, Artificial Sequence; identical to SEQ ID NO: 116
  Synthetic polynucleotide

SEQ ID NO: 262 - DNA, 5749 bp, Artificial Sequence
  Synthetic polynucleotide
ataaatggtagaaatctgtgggttcaaatgttcaattgctggggatcttcgtgatcatgatgattcatacacaatctctagaaacacgtacgcaaatattaattaatcaatttcctttttatagtctcctcacaattcacatgaaacttcatactctattatccgattccatttccatcgtatctttgaatttgacatttgtttgcccaacatgtaattaactttcccttctcatcttaaagatgtaacatgatatatattataacttgtaattaacccaatatttttaactctctatttttacactcatctgacatgtatttttatttttcatttttttttcttatcacatcacctcttacgtgtacaatttttctctttttcttatttctgtcttccataatagtaattaatattcatcggtccgatatgtatacagcccaaaaaagtgtgtaaaatcatttttgtatttctaaccctctctttctcatgcaagctagcttcttctttctatttatagcccttctcccttcacccaccaacacaccacaactccaaactttttcctcttgttctcttcttcttcaacacaactagtcataatccagctcatctctctctccctctctctttgttctctctttctctttctccaaaatggctctaaactacccttttttaacctacttcatactactgctatattcactgtgggaaaaactgagcaatggaaagctccgattctaccagagcttgacattgataacatatcccacaaactccatgatgaccctgaaaccattcaaatggcttcaagggactatggccatttaacgcatgaattcccattagctgtgtttcgtccatcttctatagatgacatagtcaccttgataaaatcttcgtacaatagctttgccccttttgacatagctgcgaggggccaaggccactccactcatggacaagccatggctcgtgatgggattgtggtggacatggccagcctaagaaaacaaagaaatggggttgcgattagtgtctctaaggaccctttgatgggtcactatgctgatgttggaggggaacaactctggattgatgtgctacatgccacacttgaatatggacttgcaccagtttcttggactgattatttgtacttgaccgtgggagggacactttctaatgctggaatcagtggccagagcttccgttatggacctcaaatcagcaacgttcatgaaatggatgtcatcactggtatggagttagttgttttttttaatcaataaatgttaatattattagcttgttagttttttttgaaaaaattgaattaactttcgtttcctcttttctttctttttttaaccacacaattaatctaataactactggtattaagttagtttattttccatttttcatatataagttaggatttctaattaaaattgacatttcgtaccaccactacaaaaaaataatgtatcagtggcacaaaaaaatatattggcatcacttgtttttttagtcattaatattttgtagcatcacaaaaaatatggtgacaagttttctaaaaattacaaattaactgattcgtcagtgatgttaatgattttttagtgcgtcttggcaactaatgttttcatcttatataaaattagaaacaatagcggcaacagcacctgacattgtgtttgtgttttgcgtgtttctatcgcctaatttttgttgagaacgtgttcgtgaaacttggaaaaagagaaaattgaaattttcttgagatatctaccacttaagaaaaacaaatggctgtttccgttttgtctcttatgacatgacatggtacgtcatagatgaagttctgctaaatatatttgatatgatttcttgaacacgttttatatattcccacttcccagttagtgtggttgttgaatctaattaaaacaggaatagtctttgtctacaatatgggtgagcgatgcaaactttccaagggtttagaagttagaactatataggtccacggtcataattttatattcttgattaactttatgttggttaagtcgttcatatttggtcaattcattcatatgagaaaatactgaaatacaaacatggaaaaatgttaattactcttataattggcgcatgcatgcatctaaattatatgattttaataaatagtttttgtcatctacttgatttcaggaaaaggagagttcgtaacatgctcttcacagaagaacttggagttattccacgcggttcttggaggcttgggacaatttggagttatagcaagggcgagaattgctcttgagccagcacccaaaagggtacgtttatagagaattgactagaattttgtcttgtagcttttcctccaccaattcatatagtgacacctaatcgaattgtcatttttttttacggtgaattgtcattttgtaaatctaccaagtggtagttggcacccatatatgtatgaactatagtaccatacatttcattttatgttggtgtgttagtcatccatgatgaacacatacacaaatgaaaataggacgagttatacgtacgtaagggtttgaatcactgaatgtggatttttgaagttgaaagcatattaatcttggtttgaaaaagaaaaaaaaaatcggaagtccctcttgaagttatcatgactcttatattaagccaatagaattagaaaaactataattatgaatgatcatgttaattctttcagtgacttaaaatcttatctacaaaaagtacccttttgaaaaagaccttcacttaagtccatgcatacagtactaatcttacatacttgagagttgagacttgaagcatgaggagatttgaagtctggagaaacaagccaccacatattaattactaccgtattcttatctttatttatccttccaattttgatgggactggttgcacatacattcatacatactaacatacataaatacgtctctctctcatgtatttcattttattatattctatttcgttagtaagtttactagtataagacattattaatggtgaatttttgttggcatgcaggttaagtgggtcagactactttatagtgacttttctgcttttaccaaagaccaggaacgattaatctcaatcaatggaaggaaacaaaagaacgcattggattttctggaagggatgctgctaatgaaccaaggccccataaataattggagatcctctttcttccctctatctgaccatcccagaatagcttctttaataactgaacatagcatcctctactgtcttgaagtggctaaatattatgacgaacaaaccgagttaaatgtggacaaggtaacctcgtctagtcatatctattatatatagttagatcttgtcacatttctttgtttaaaaaataaaataaaaggcacaatcccaaaaagtcaaaagcaaatgcctagatattgtgtgttttcttggatattaattattacaccttaataacccataataatttttttatttttctttgtctctgtaggaaattgaagttttgctccaaggactagcctatatccctggatttaattatgagaaaaatgtctcgtacgttgagttcttgaatagggtccgaagtggagagttgaaacttcagtcacaaggactgtgggaagttcctcacccgtggcttaatttgtttataccaaaatctcaaatcttggattttaattcaggagtattcaaagatatagttcttaaaagaaacatctcctctggaccagtcttggtttatcccatgaatagaaacaagtaagccttgaatgcatgaatcacaatctagtgtcattataattcaggagtgtgtgatgcaatcttttaattttctgaccattcaactcaatatcaattttatttcttttttcaattaaaatgcaaaagagaataataattaataatatgaaatttaattccaggtgggacgataggatgtcagcatctataccagacgaggatgttttctacacagttgggtttttgcactcaagtgggtttgatacttggaaggcatatgatgctcaaaacagagaaattttggagttctgtagagatgctggcatcatggtcaagcaatatcttcccaaccacagcacacaagaagattggacaaaccattttggtgctaaatggatgaaattcttagaaagaaaacatcagtttgatccaagaatgattctatcacctgggcaaaaaatcttccacaaaaaattacagccagtgttttaaatattttccctaataaaaaaagtaaaaatgttttgtggtgggactacctcaattagatggctagctagggacaggtgtacatacagtgtgaccaagaccaagatggcttttgtatgctaaagtttgcattgctagctagagaaattaataaggtggggcattaaaggctgcatgagtacttttggcacctattatgctacatattaccttagatacgttaggttgacaaagtcgtactggtaggtacaagaagcacagttgtctctcacactgtctgtcacccaacttgctatatagtgtgtggagaaattcggatcatattgaagatgctgtgagttatagtcctccaatattaaatgtttaacgattctgtctttctcttatataattttgttttgcattatattactttcgcactggtgcaaacatatatatcaatgattataattaatttatacaatgacgagtataattgtacccaagttgcatgccataatatttgtcaaaaacaaaaagttgtatgccataatcaatccaggttgctagataataagatagatatgaatatgataacataaaatgctattaaagcaacaaataaacaataacacatagtccttatagggttcataattgatcgatgaacctagctagacgttgattttaggttaatttccagcgaggataaaatttattatataaagaaataactaaccaacacaaaataataaaaaattaaaaaaaaacgaagaaacttattttagagatataatttgttttagtatttgattgtaatttgagagattagctaggctctcaccaagtgagatctagagtatattcttaagaaaatatttataataaagaacccttaaacattttgcaaaacaaagggtggaattaatattaacaacaataattataatatcttgaaaattttatgaaaataatatatatatatatatatatatagagagagagagagagagagagagaaaattctcacaaacaatttttatctgttatttcaaattggtgtatgactccttagtccttagttcatttgtttgcacccagtcctgtcttaggtagttgattttatagttaggtaaattaatttctcgcactcttcgcttgattgtcatttatgggttgaactgttgaagtgattttatattttttaataaatttcacctgcaaaaaaactcaccattagcatacgccccccccccccccccccccccctctcccaaaaaaaaaaaaaaaacgaaagaagattaattagaaagaataaggtcgtgaaatgatgttacaaataaggcatatcagaatcagacgcaagggaagaataaaaacgttacaacaattcgcgcacaatgcaccccaaaaaaaaaatgacaggcacacataccttaaggaagaagaatcaacgctttca

SEQ ID NO: 263 - DNA, 7385 bp, Artificial Sequence
  Synthetic polynucleotide
ttaaatcggttcaaaattgttgaatcgatccaaaactagtaaatacagtaggttaattgatttcacttgaaatttaaaaaaaaaaaattaaaatgacgtcattttagtttttttttaaattattataacttatatgacatttttaagtgaagtttactttttattattattaatttatgcatactaggtttctgaaatattatattaaaatattatatatatatatatatatatatatatatatatatatatatatatatatatatatatatatatattattaaaatcaattccacttcgattgagctattaacttttgaaccaatatcttccccagttcaatgaccatccaagtctgaaaacattggttaccatcaacgttacccttccgtgaattggaaaagttaatgcaatataggttgatccaaggataagtcctatggtcccagaaagaaaatcttgagagatccttttgataattacccgagtttttactctctccttttaattcacgaaattggaaacttcaattgctaatataaaaagaattttgttagccaatatcatcagggtattgtcaaagaattacaagaaaaaaaaattataagataacataaaaaaataaaaaacaacataattttatatattttaataaaaaattcttttaatttttttttatcaatattctatagttactggcatttgacatgtaaaaatgtaaacatatgaattgataaaatttgaccaatgtttgaccctgagataggaatccaacggccccagttcaattgcaatcttttatttttactacgtgaaggcccaacaatggagaaccttgtggattttattgctgagaatctgtggttacgatgatgacacaccaacacaatcacagaaagcaagtaccgtttggaaggcctaacacttcattaattgcttcattaaatttattttactttctagctgctcaatttaattgctttacacaaatacttcatgacgtttcagaaggagggccaaatacaatctctacaatggttccatcgtatctttgaatttgacatttagcatccctccctttgcacaatgtacaatttgcattttgaatatttttttctcaccttcatatcgtgggactacttctataaccatcctggtgaaaataaataaagcgagggaattacgtaattaaacatatttaaatttctctctcctctgtttaattaatttatcaaaaacaaatatgtgtgcgagtatttaaaaatgtgtaaagtattattattttttaatttttcttttttccttctcatcaatgataaatatactttttaatataaaaatcaaacaataactataaaaaaaacatcttcacttcaattcaacattaaataaaaaataatccctgctttgttattttttacccaccaattatcatatttgttatttattatttttttatgttcttgctataaaggaaatcactatttgactcacacaaaactataaaggaatcaaataatcaattattatttaaaaactctattaaaataacaattacaacaaaatcccttatttttttcttccttatcattattaaaccttcccattctctctttctatctctacatgtttttctcaaattaaatattttctatatcctcctttatcatgcaaattaaagtcctcttccattctatatatagccgctacctcctccacctcctttccccactacaacacacaaacaccaacaaccaaatcaatccatccaccctagaaacaacaaagcactctctcttctctcattctattatcttctctcatcctcttattctctccaaaccaacaaaaaaaaaatggttgctgagaactacccttctcccacatacttcatcctcctgttgtttgatctccacagtgggcaaaacctcccaatggacgaaggccctgtcgctgcctccggaactcgcctccgtctccctcgacgacaccatcttctgcaagctccgtgacgacccagaggccctccagggaagggcctccagggactacgggaacctcgtccgcgaggttcccttggcagtcttccacccagcctcagcgagcgacatcgcgaggctgatcaagctgtcgtacaacggctctgtccccttcaagattgcggcgagggggcaagggcactcgacaaggggccaggcgatggcacgtgagggggtggtggtggacatggcggggttcagagagagagggaatggagtggggataagggttgtgagtagtgtggaccctaataataagaatggttactactattatgcggatgttggaggggaacagttgtggatcgatgtgctacacgccacgctcgagcatggacttgcacctatgtcctggactgattacttgtacttgacgctgggagggactctctccaatgctggcatcagtggccagacattccgctatggtcctcaaatcaccactgtccgggaaatggacgtaatcaccggtaagaaaactttccattcaaccagttaacttacatgtttttagttttttagcttccaatatccaatagtttataacttgtaagcttcaattttatgttaatttataagctagttttaccctacttttgaaaattcaaggattttggtactacaataactcccttgtcaaactcgttcaattgttggcttagtatcaagtagactcttggatttttaggtgtactttaacaaccatgttaatttaattgatcagggttttaatattatggaaattggccattggacaacttggaatggaaggaaagcgggagatggaaagggaaaagaaattaattagaataattgttaatattagttgcgtgaaaaaaattaaatttgctgaattaaattatggttcatcacgactctatttgtggcaacaccaacgtgccgttttcagaacttcattgcaacagcggttatagtggcgtttattcaattcatattttaatgcatcagactgtgattgcgattgaaattttatgaaatcttgttttataaacttgttcttttgattaggaaacttgattctattttatatatatttaatgtaacgccgaattaatggttgataaacgagtctttgtctaaaattttggcgaatgttagcaagcgttttccacgtggtcccgtacgtgtttgaaaaattcttaatcatggaatcagttcacacgggcagtcatagactcatagactccaattcttgattaattgttttcttattaatattggtccatggtcttattttggtcaattctttttattaaaaataaacgggctgctgaattttaatttactcaagtgtttgttaatgaatatgtgtgcatgcatgcaattatatatatatatatatattactattatttatttgtgttttaatcaaattttggtttggttcaggaaagggagaatttgtgacttgctctcagcagacgaattcggagttgtttcacgcggttcttggaggcttaggacaatttggaattataacaagggcaagaattgctcttgcgccagctccgaagagggtacgtttaaaatcttcggaattgactaggacttgtcttgttgcttcttcctccaacatctctcatatagtaacgcaaatttctaaatatgttacattattaattcaaccaccaagctttgcggaagcatcaaatgtcgttgtcctgaaagcttcatgtcatcatttttcttggcacccatatacacacacatacgtttcacattgtgtcagtgcatattagtcatccatgaaagacacatgtacaaatgaaaacgagaggagttatattaaaatgtgtgttggaaaaatatatatcatattttcataagtcttaattttgaaattaatatacagtaaccctttgagaccttagcaattaagccaataaaaaggctcgtattaaccccaaccaacaactattagaaaatactaacaagtataggtgtatacataaatgattcatttgaattttagtaccttaattatttaactttatccttctatttgacgggactcgttgcataagccatacatacataatcatgcgttcattattgtttttcattatgagttaatgagttgattgtatgaactaatggtgaatttttgttggcaggttaaatgggtgagacttttgtacaatgacttttctgcttttaccaaagaccaggaacaactaatatctatcactggaaggaaacaaaatgtttcactggattatttggaaggattgctgctaatgcaccaaggacccataaataattggagatcttctttcttccctttagccgaccatgcccgaataatttcgctagtaactaaacacagcgtcctctattgcctagaagttgccaaatattatgatggccaaaatgaaaacaatgtggacaaggtaccatctccattcatgtgcatttgccttgatgatgtttcttctattttttcttttaatgttttgatctcaccttatataataaccctttatcacactcaatcttgttatatttttaagagtttaatgataatattatgattttgttgtgaaaaaagagagtttaattgttattatataatcacaaattatcattaatatgacttttaaaataattaataatataaaaattaataaatttatcgtatttaatgagttataattaaatgatcatataaaattattttatattattaacatatagtttttttttctatttttaatatttgttttactataagttgttatattttcaatcttttttctagtataagttttaataatcaatattgtaagtaatattctcatttttcatgttgtgtaggaactccaagttttactacaaggattgagctatatccctggattttactatgaaaaagatgtctcatattttgagttcttgaatagagtccgaagtggagagttgaagctacagtcacaaggactatgggatgttcctcacccgtggcttaatttgtttataccgaaatctcaaatcatggaatttgactcgggcgtgttcaagaatatcatccttaaacgaaacatcaccacaggacctgtcttggtttaccccatgaatagaaacaagtaattgagcttaactaactaatctcaacttatgttgttatcattaggaaaaatgttaattggtacgaaaactatatataccactattttcatttaaattcatgaaagtgaaatttctctttcctaaaacaaattctttctcttaaaatgaatttttgtttttctcaatctccatcaattacttatttccttttttgaatgtttgaaaagtcattcacaacattttcttcataaaagggttattcgtaccaatttaaatagaattgccgttattatcagatgtacaattcttctcttcactcacttcttttccattaaaattgtaaaaaaaaaataaaaaaatcaggtgggacaataggatgtcagcatcaatacccgatgaggatatcttctacacagttggatttttgcattcaagtgggtttgataattggaaggcctatgatgctcaaaataaagaaattctacaattttgtaacgttgctgggatcaaggttaagcaatatcttccccactatcgcacacaagaagattgggcaaaccattttggccctaaatggaggacttttgtagaaagaaaacaccagtttgatccaagaatgattctatcacctggacaaagaatctttaacaattaaaatagctttaaaaatatatattcccccccccccccccccccccaaaaaaaaaaaaattatataatatggtgggactacccaagttagctagctggctgatcacaagtgtgcacataggacccagaattcagatgatagcctttgtacttgtttttgttaagagggtggggttaaaagctgcatgactttggcatatatgtagatcaggttacacatactttagatacgttaggttgacaaaatcatgtgtgaaataagatgcacacagctagctgtgtacctttctttctctctgtccctcaatttgtctatcactaaaaagatttctatatagtttagaacctagtgaagagaaagaaaaaaccattatattgaggatttaattttatcacgttctaatcctatacattaatattcttaaatgtgcaatgagtgtgctcggtgccttaatgattctttatctttgttaattgttatattgtagggttttgtttttgccttcctaattttgtaacaggggcacccctagcaataattgagatcctaggttaactaaggaacagcattattgtgtctaaattgagattcctagctgtatgccataataataaatcatcgtaggttgctagatagatgtgatagcgccaaatgccttccaatactataatctccattgcaagatccttcgttgtgattgtgtagaaaagattacgctgctttacaagagaatactccaagaaagcaagtgattgctccttaatataaagaatcatgcaataaacaaatggtgtcgtaatccataaagtgtatttaatatttgatgaaagagtagtgtagacatcaaacaaaataaagtttgatgcaattcgaattatagatacttgattaatctctaaattatgttgagacaatcatatttgaatttgataagactattatgaacgataaaaaatattataaataataaaaaaatttcatcaaacatttaatacaattatataccttactcaaatttgaaaacctgtacatataggaaaaaaacctttactaaaagaggttaaactcaccatacggatttttatatgtcgaagggatctttaattgtccatcggaaaacatcctaattcataaaaaaggaaagaaagtttagacatgaataattacggaccaatgaatgcaacctacgtctctcaattttaaggagaatttaggaatattatagtatatcactgaaagtacacacaagtggcaatgatgaatattttaatttaaagttttaattggattcgaaattaatcccttcttttttccagaaaaaataataatcatcgagtaatcaagacaatttcccaagtagacaacaagaatacaaaagagaatacgtgacttcgtttcaccatagaaaagaaggaatgcaataacgatgataataattataaaatgaaattgacaaaatatctaaatgcctgtagatatttctacagcgaatgataagtgtttttccattaaaaataagtttcttttgttaagaatttctaacatttttagttccaaaatataggaatgaagccaataagtaagtaagaatttctaacgtctgaaag

SEQ ID NO: 264 - DNA, 5908 bp, Artificial Sequence
  Synthetic polynucleotide
atttagcatccctccctttgcacaatgtacaatttgggttttgaataatttttgtcacaccttcatttcgtgggactacttctctaatctatacccatcctggtgaaaaataaagggagcgagttacttacttaattaaacatacttaagtttctctctgactctctctcctctttttaattaatttatcataaacaaatatgtgtgcgagtattaaacccgtgcaaaatattagtattattgtttaattttttttccttctcatcaatcataaatatactttttaatacaaaataaaaaatagttaactcagaagatttcttcacttaatcacttcgattcaatattaaaaatcaatccacgctttgttgttttttttcccatgacttatcacgtacatttattatttattatttttctgatgttcttactataaagggaatcactatttgtcacacacaaaactataaagggaatcaaatgatcaattcttatttaaaaactctattaattaaaattacaattacaacaaaaccctaattttatcctccttataattaaacctccacattctctctctctctatcaatacatgtgtttctcaaattaaatattttccatatcctccttttatcatgcaaagtcctcttccattctatatatagcccctacctcctccacctcctttccccactacaacacacaccaacaatcaaatcaatccatccaacctagacatctctcatcttctccaaattaacaaaaatggtagctgggaaatacccttcccccacatacttcatcctcctgctcataaccataacacgtttgatctccacagtgggcaagacctcccaatggataacgccgcctccggaactcgcctcggtctccctcgatgacaccatcttcagcaagctccgcaacgacccagaggccctccaggggagggcctccagggactacgggaacctcgtccgcgaggttccctcggcggtcttccacccgacctcgtcgagcgacatcgcgaggctgatcaagctgtcgtacaacggttctgtccccttcaagatagcggcgagggggcaagggcactcgacgaggggccaggcgatggtacgtgatggggtggtggtggacatggccgggttcagagagagagggaatggagagggaataagggttgtgatgagtgttgttgtggaccctaataataagaatggttatggttactattatgctgatgttggaggggaacagttgtggatcgatgtgctaaacgccacgcttgagcatggacttgcacctatgtcctggactgattacttgtacttgacggtgggaggaactctctccaatgctggcatcagtggccagacattccgctatggtcctcaaatcaccactgtccgccaaatggacgtcatcactggtaagacaactttcaatttattcagttaattttatcatataattttaccaaatacttataaaccatatcagaaacttttaatttaatcaactaactcacaattagtttaatcatatacttttaatttaatccactaacttataaatttgtaacttttcagcttggaggtttgtaggttataagtctcaactttccactaacttataagttagttttagttttattgtatgtggtacttttgaaaattcaaggattttggtactataataactcgttcaactgttggcttagtatcaaaactcttggattttcaagtgtacttcaacaaccatcttaatttaattgatcagggttttaatattgtgaaaattggtcattggacaacttggaaagtgacacagcttggaaaagaaggaaagagggagatgggaagggaaaagaaagaaaataacttttaaaattagttgcgtgaaaaaattaaggttgctgaattaaattatggttcaccacgactctaattgtggcaacccaacgtgccgtggttgtggatattttcagaactttattgcaacttcggttatagtggcgtttgttcaattcattttttaatgtatcagactgtgattgcgattgaaattttataaaatctttttttttttaaacttgttcttttgattaggattaggaatttcagaaacttgattctatttcatatacttttttttaatgtaataccgaattagtggttgataaacgagtctttgtctacaaatttggtgaatgttagcaaccgctttccatctggtcccatgcttgaaaattttcttaaccatggaaattagttcacacggacagtcatagccttcaattcttgattaattgtttccttttctaaaatatggtgatactattatattattggtccaaggtcttgttttggtcaaatttttttattagaaataaacgggctgctgaattttaatttactcaagtgtttcttaaagaatatgtatgcatgcatgcaattatatattattattattatcattactgttatgtttaatcaagtttaatttggtttggttcaggaaagggagaatttgtgacttgctctcagcagacgaattcggagttgttccacgcggttctgggggcttaggacaatttggaattataacaagggcaagaatcgctcttgccccagctcccaagagggtacgtttaaaatcttcaagaattgactaggactttgtcttgttgcttcttcctccaacatctctcacatagtaacgccaatttctgcatatgttacattattaattcaaccatcaagctttagggaagcatcaaatgtccttgtcctaaatgctttatgtcatcatttttcttggcaccctttcgtttcacattgtgttagtgcatattagtcatccatgaaagacacatgaaaataaaatttgttggaaaaatataaatcatattttcataagtcttttgaaatatacagtaaccttagagaccttaagcaattaagccaataaaaagggtcgtattatcaaaccccaactaacaactattagaaaatactaacaagtataggtgcatacataaatatgtttccactagaaagtatataaagttggtgagatgattcattttgaattttagtaccttaattatttaactttatccttctatttgatgggactcatcgcataagccatacatatatacataatcatgcgttcattattgtttttcattatgagttaatgagttgattgtatgaactaatggtgaatttctcattggcaggttaaatgggtgagacttttgtacaatgacttttctgctttcaccaaagaccaggaacaactaatctcaatcactagaaggaaacaaaatattgcactggattatttggaaggattgctgctaatgcaccaaggacccataaataattggagatcttctttcttccctttagccgaccatgcccgaataatttcgctagtaactaaacacagcgtcctctattgcctagaagttgccaaatattatgatggccaaaatgaaaacaatgtggacaaggtaccgtctccattcatgtgcatttgccttcatgatgtgtcttttatttcttttcttttaattttttgtctcaccttatataataaccctttgtcacactcaatattattatatttttaaagagtttaatggttatacactatttttactttatttaattataaattatcattgatatattttttaagataattatcataaaagttaataaatttatcagttataattgaatgattgtataaaattatttaatttatattgcataatttattttctatttgtaatctttttttactataagttgttatattgtaagtaattaatattctcattttcatgattgtgtaggaactcaaagttttactacaaggactgagctatatccctggattttactatgaaaaagatgtctcgtatgttgagttcttgaatagagttcgaagtggagagttgaagctacaatcacaaggactatgggatgttcctcacccatggcttaatttgtttataccgaaatctcaaatcatggaatttgactcgggcgtgttcaagaatatcatccttaaacgaaacattaccacaggacccgtcttggtttaccccatgaatagaaacaagtaattgagcttaactaactaatctcaatttgtattgttatcattaggaaaaatgttaattggtacgaaaactatatactacactattttcattaaaattcatgaaagtgaaatttctctttcctaaaataacttctttctcttaaaatgaatttttgtttttctcaatctccatcaattacttatttccttttttgaacgtttgaaaagtcattcataacttttttttcataaaaaggtcatttcgtaccaattaaatagcattgcctttattatcatatgtacacaattcttctcttcactcacttctctctttttttttcccattaaaattgtaaaacaaataatcaggtgggacaataggatgtcagcatcaatacccgacgaggatatcttctacacagttggatttttgcattcaagtgggtttgataattggaaggcctatgatgctcaaaataaagaaattctacaattttgtaacgattctgggatcaaggttaagcaatatcttccccactaccgcacacaagaagattggacaaaccattttggccctaaatggaggacttttgtagaaagaaaacaccagtttgatccaaaaatgattctatcacctggacaaagaatctttaacaattaaactagctttaaaaaatatatataatatggtgggactacccaagttagctagctggctgatctcaagtgtacacataggacccagaattcagatgatagcctttgtacttgtttttgttaagagggtggggttaaaagctgcatgactttggcatatatgtagatcaggttacacatactttagatacgttaggttgacaaaatcatgtgtgaaagatgcacacagctagctgtgtacctttctttctctctctctctttctttctctctgtccctcaatttgtctatcactaaaaagattactatagtttagaacctagtgaagatggaaaaaaatcattatatagaggatttaattttatcacacgttctaatcatatacattaatattcttaaatgtgcaatgagtgtgttcggtgccttaatgattctttatctttgttaattgttagtatattatagggttttgtttttcccttcctaattttgtaacggccatccctactagcaataattgagatcctaggttaactaaggaagagcattattgtgtccaaattgagagtcctagctgtatgccataataataaatcatcgtaagttgctagatagatgtgataacgccaaatgccttcaaatactattattaatctccatcgcgagatccttcgttgtgattatgtagaaaagattacgctgcttttacaagagaatactccaagaaagcaagtgattgctccttaatataagaatcatacaataaacaaatggtgttgtagtccataaagtgtatttaatatttgatgaaagagtgtgtagacatcaaagtgataaaactaataaatttaagtttgatgcaattcgaagtcgtagatacttaattaatctctaaatcatattagttttaaaccatacagattttaatatgttgaatggattaatctttaattgtgcattggaaaatattataattcataaaaaaagaaataaagtttagacatgaataattacggactaatgaatgcaacctatatatactacgtctctcaattttgcggagaatttaggaatattatagtatttcactgaaaggacacacaagtggcaatgatgaatattttaattt

SEQ ID NO: 265 - DNA, 5904 bp, Artificial Sequence; identical to SEQ ID NO: 226
  Synthetic polynucleotide

SEQ ID NO: 266 - DNA, 9678 bp, Artificial Sequence
  Synthetic polynucleotide
ttaaaaatatttaaagacttaattaaaaattattaaatatttcagagatctataaattaatttaacataaatgaaagtgttatcaaatatgtctagctaattgaaaaaaaaaaacttaaataaaaatttctttttacctgtcttattaggtgactaaggatataattgataaacaaaagtaattaattaattataagatctttaactttataaaaaataaataaaaaaatcttttaaaaaaaattcgacaattaaaaagaaattaacagagggagtaacaattttttacattaaaaaataaatttaaaatttgagtttaacggtcgtattatcatttagtgataaattatcgatataaattttaagataattattataaaaattaataaatttattatgataatttataattaaatcaaaatataaaattatttaacaccacgtgcataataatctaattcacaaaaaaaagaggtaatttatatagtctcttttattaccttatttttctgagtagtaataaatagacaccaagtgttaataataaagtttatcctttctcctcctatccgtctctttatttatttttcattacaaactttatcaaatctatcaatttctctctcttctatctttctctttgttctatccatacaacttaaaaatgtggttgtagtctaaaattttgcctctaattactgtctaccgcggtgtacttgacctgtacaattacctttcagatgctattataactagagaaatttagctcaagacttaaaaacaatggaccaagagatgtgctgtttccacaatgaggcacgtgtctcctcggtccagtcacgtgaagatccacgtgcctttactctgagcttgagccttagtagtttttcgtggttctctccctgtcctataaatttgagagcctgtatcttacatcctagacacacagtagtgactagctcattcattacaattcatcaccccagccaccaacccttttttcatgccaaaccacgaatttgcttctaattttcatgccaaaccctttcttctttcttttgagagagacgcaatccgctcctctatcttactggctagatcaattcctttctattaatttgcttctttctcaatttgtacatgccttcgatcttatagacatacatatatctcctaaactgcacatagagatttaaaaaaaaagaacaagttacaagtagaatttttttggcaagaatcgaagaaagtgagtgagagaaaagaatcttcatctttctgcatgttgcgtacagaatctttaaagccaaatcctgctcacgttaacccacgacgctgttccaagattttgttctcttctctggagcttcccaacattcttcctttccctcatccaccacccccactacccaataactcatcatcatcgtacgccacacacatgacatgcatgtatcttcattaattccttagcgaaaccacacgtactctagcttgtggggtagtttttaattattagttattcttatcttgttcaattcatggctgtcaacaactgtgggattaacggtggtcccggagctgctcgatgtgggactccagggtcgtctcagcgtggacacgttggaactggaggcggcttcggtggatttcgggaggctgagtcgaggggagccttcggaggtagtgcaccctgccacggcggaggatgtggctagggtggtgaaggcggcgttcgagtctccgttcgccgtgtcagcgagggggcacgggcattcgataaacgggcaagccatgataaaagagaagaaaggagtggtgattgaaatgggaaaaagtgatagtggtgaggatggtagtagtattagagtgagtgagaaaggaatgtatgtggacgtgtggggtgggaagttgtggatagatgttttgagtgcaacattggagtatgggctggctcccatgtcttggaccgattacttgtatttgtctgtgggtggaaccctatccaacgctggaattagtggacaaaccttcaatcacggtcctcagatcaccaatgtttatgagctcgatgtcgttacaggtaatttaatatataatataatttgcattcacttttaactaatcacaaatatcattattggtatacttttttaaggtacaatttttgcattcacggttaatttttacaataatagtactatgtttaacatttgacaccttcaaagagaaaaaaaggagttctaccattataaatgattctaaagatggatttatattttcgaaaattaatgtttattatatacatttttaaataatttaaatttgttggtgttattgttgccaaatttgattgttttaccgtaagaaatgatgcttgtgcatgctaataactagttgttcttgttccccaagaggaaaagttaattttcactaattaaacagaggtgtcccactggtttgtcatggtgctgagtacaaacgaatctcgtttatctttagcgtggttaatctcgttgatatcataatgtgtactggtgtgtaacaggaaagggtgagctggtgacatgttcagaagatcgtaactcggagttgttccatgctgttctaggtggtcttggacaatttggaatcatcacaagggctagaattgctctcgaaccagctcctcacagagtgtgtatctctcccacgtactttatctttctttgtctctttttcttactcacacatatacagtacccaattccctctttcctaattgtatgactctcttttcgtactagctcgtgacctcgcacataatatgctaacatttcatgtaataattgaagataaagttataaaaatgaataatattatctgttttcataatgcatacatatacttcatttttattttttagaaacaactcaatgtaaataaaatttaaagtgtaaatattatttctttttttccatcatggaaaaaaaaagtcggttgaacatgatttccatgagatgataggaggggcacacacgatgcgtcttttcttggaaatctttcttcacatcagcgacaaaacctaaaaaaagggtcgttttcgaagggatggtttgggtactcttctaacaatataaagctggaataattatcgtttgcgtgtcgcctgcctgggacattctctgttttaattcatttctcttaacgaactaatatcactatcgattaagggaactgatatcaatgagctataacaatagaatattctcgtctaattaatattattagggtttaatttctatttactgtaaattaatattactataagaaattttacattttcaatcaatcatacatcatcgtggtggtataacttttaaagtgataattactataaaaaggaacatatacttctcatacatgtttatttataattgagagattagataaaatttgtttacacgttcaatagatatattattttctccaataaaattatattagagttagatatatgataaatatttaagtgcaggttcggtggatacgagtactgtattcgaattttgcaaggttttgtaaggaccaggagtatctgatatctctgcatgggaaagcagcaagggagagattcgactatgtggagggtttcgtgatagttgatgaagggctgatcaataattggaggtcttcgttcttttcagctagtaacccagttaaaatcacttccctcaacgctgacggaggtgttttgtactgcttggagattaccaaaaattacgaccaaggaaacgcagattctgttgatgaggtacgtacacacccaatcccacgtacattttctcttctttgtcagtgccttcacttatatataatattattgactgttcatacacttagtgcgctgtcacaataaaatatattcatttaactttcattagtttaattatgtgaagttaccttatttcgtttactaataacgtgttcatatcttatttattgcgtactccacttcgtgtacacattataattgtcattttttatcattttacaccaagaaaataataaataaataagactaataataattttataaaattaatattttattattattaattcatttataaattttgttatttataattaatatgataagcgatataattaaaaaataataattaatgttacatttaaaaattaaaatgataattattttgaaatatttttttctcttgtatgacagttactttaatgttgaagaaaatttagatagaattaaacaaaatgattggacaaaataattaatatattaaagttaaaattaaattatttcagtattatttaagtttgatatttaataaaaataattttttattcgattttacttattttttgattgaattctagattagttgagattcaatttttttaatgagttggagggataggaaaaaaatagttagatagaattaattcttgaaagagtgaaaaaaaaatacattgaagcttttttttattgaaacgtgtaagaatcgagattctaacaaaaaataaaacagggcttaagtagttaagtttttaccaaaatcactccacctagctagctaatgttgcctgtttaatttactttatgtatttttatttttttttcggttacatccatttgtttaaaataattgtttctcaaatatgctacttgatgtccatgttgttcaaattctaaactctagaaaagacatgaaatataagtatgtgtcagaataattaattaagtcttcgggctttttcgtccagtttttgttagttggtcaacacatttatgcttcagagattctataggatttatagggagcaaaatataaaattaacaggcaaacataaaaggacaaaattaatggcgttgatttgaacatcaattaaaaagtaacattgatattcataacaaattaacagacaaatgtgaaagaacaaaaatagcattattcaataccagttgtttttaccacattaaatttgaacgtttagttttgagtcatctgtcctttctctctttatcgttctacccttgagaagatcaacggaagaaatatgtcaattattctgacgaatactctcatatgattatgcgattaatgtcaagattttcttcgttcacaaattcatgcttactttaataattcagtatctgtctgttttatgtttgaagtctgatttaatattgttaatggtatctttaagtaattggtcaaacaattcaattaacaagaaaaatgatatacgctgtccagaggtaatcacattttatttaatttcataatttattgaattaaaaccttggttcttccttcatcgctgtcctcgtatatgattattctctgtacccaaacattgaccagtctctagttgtagaacagaatgcaataaaacatacaaaagaaaacatgtggaagatcttgtgcaatctatcatctcgattcaatcgcaagattgaatgcaacctttacaatagttaattttcactgtttaaaaatgccggcagtccaccagaatattctctcacttgtttttaacttctcttaattaattcttgtcaaagctatatataactgctcacaatagtgggtctcatatcccgacaaaagcaccggctaccttagctagcagctttcctttttcatgcataactatttaatttaagacctagagaggaaaaaagagataaatatagtttaaataagtgatatgatgttatagaaaaataaacataaaatatgttactagagtatttcatttatatatatatatatatactccacttttataaatatatttaaataaatagttatttgtattttgatctactagaatgacgtatgagagatttttttttaatctttaatttttgttattaagtacttatgtttttaaagttaaacaaagttagtctttctattaatattctttacaaaacgtcaaaacctttaagttcattttctgtttaaaatatttataaattatatctattacattatttaaatactttttattcgaagcataccaaccgaaattaaacatcaaaagacattttcttagatttctctttgtacgtttttatggtatgcaggaaatacaagctctattgaaaaagttaaattttataccaacatcggttttcacaacggacttgccttacgtggattttctggatcgtgtacataaggcagagctgaagcttagatccaagggtttatgggatgtacctcatccgtggctcaacctttttgttccaaaatcaaggataggggacttcgacaagggtgtgttcaagggcattcttggaaataagacaagtggacctatcctcatataccctatgaacaaaaacaagtaagtttataaatatatatttccgcatgcatatccatttgttatactatcatattcatccatgtcctagtcatatatatgtagaataaaaccactgcatgtttgcaggcatgcacatatctcctcatatataaaccacatgtctgctgctgatagcctcatatcgactgtcagtgtttagggaagaagaaaagaaaagaaaaagttcaaatgagtaatgaaatagagtatgaagttttgtgatcatatatgaaagagaaaaacctgcaacataatatatattttctacaacgaatattcccaataattatggaactagatgaaaatgtgtgaagattctccacgattgatggacagatagtactattgtcggaattaatggattagggaataaacagaatctagacgtttacattaatcctaataatagatggctgaatctgtttgtttctactttcattgtgtgtattaattaatccaggtcctcgataattcttgaattaaagaagattctgtttgataaatttgtctacacttaattaaacactgacaaaaaaaactaaaatgaattaatttatttttataaattaaaatttacatctcaataaaatattagctatagataacttaaattaagaatgcttaatccaattaagtgaaaataaaaaatatgaaaagaacaagaagcacagtgaggtgcatgtagtggaaagacatggaagacacacgagggttgtattgtagccaacatagcagatgaaaatctgcatcaaagccagctaggaagtgccacgtttattatttcttgaccagaagcaaacaaaatggatggccatgatcatccaactggagagattctggtgtcagaagatcttccatagggacccactcctcgaatggtagggatgtctcctctccactcctcaccttttatactaacctagttccatagacaccgccatatgcatcaacttccaggtcaatatcaatataatatgcacaaataaacaaataaaaaccataataattgcacttagttatgttttttttttttcattttaaaaataccaaaaattaatgataatgatatcacaaataaaaataaaaatgcatgtttgttagagggtatataatataagaaagacaacgcttgtccaaagcatttatatatagagagagagaataagataaaaaattaaatgaattctatgtatcttgccataggtttctgactgataagtcgatggattattaatgtttttgaattagaccacgaattagaaatacttaaaaaagttctattgttatttcaacagagtagtagtaagtaaagtaaatggtttcaagtgtgcagtatagatgaatagaaaaattcaaaagatgattttgggcgatggtgatgtgtaggtgggaccagcgaagctcggtggtgacaccagaagaggatgtgttttacctggtggcatttctaagatcggcattggatactgagacgctggagtacctgactaatcagaaccgtcaaattctgaaattctgccatgatatagagatcaaggtaaaacaatacctgccccattacactacgcagcaggagtggatggaccactttggtgataagtggacccagttcaatgctaggaagatgcaattcgatccccgccgaatcttagccacaggccagcaaatttttcagtttcatccctcactcaccctcaatatgtagaacaaacatgcaaaatggataaataatcttgggttcatgttgagtagcaagtgctgtattattgtaattaggaaatacaaggaggatcatggcaaaaaaagaattagaaggatgtagttgtagtgcactagtgaaggatcaagagttgttgaggtgttgttatctgagggtaataaaattgatgatggagttggatttttgttatgtaatggggtcttgtagcaaattaagtaaggaacccaataaggattaggcccaaagaatataaggagtggtggggcccgctttggaggaggaaaagggcaatgcgcaagtgcacatgagcaccgcccgtctggtttggctgtctcgtttttcaatatagatatcttttattacccatccaaattcctcgtacatataattcttctagatgtattagtctgtatgtttatttcaaatggaaacatttaatcagtgactccttataaaacataatcaacggcatttatgaataaagttaataagttaagagggaaaggaaagaggagaggaaaatgttcaaatgaatcaaatttctcccattaacatttttaataaaattaatatttatcgataaaaaaaatatcaacaagttaagaaaataataataatagacatgtattgctaatataaaagtttccgtacacaattaattaattagaaactatcttaaatatcacttttaacaaagtaataatataaatcaataacataactttttttttatcactataatattaatgtgacatatttgtctattttgagaggttggaaacttggagacgagctctagaaacacatgactttcgcctaaacagaagcaaatcggagtatatggaatgtaagttcaacaaaagtaagagggtatctaactcagatgtgaaaatagaagaccatattatccctcaagtcacacagtttaaatatcttgggtctgtaatacaggatgatggagaaattgaaggggatgtgaatcatcgcattcaagcaggatggatgaaatggagaaaagcatcaggggtgttatgtgatgcaaaggtaccgatcaagctaaagggaaagttttatcggactgcggtaagaccggcgattttgtacggaacagaatgttgggcggtcaagagccaacatgagactaaagtaggtgtagcggagatgaggatgttgcggtggatgtgtggtaagactcgacaggataaaattagaaacggagctattagagagagggttggagtagcgcctattgtagagaagatggtggaaaatagacttaggtgatttgggcatgtagagagaagaccggtagactctgtagtgaggagagtagaccagatggagagaaggcaaacaattcgagacagaggaagacccaaaaaaactataagagaagttatcaagaaggatttcgaacttaatgatttggatagaagtatggtacttgatagaacattatggcagaagttgatccatgtagccgaccccacctagtgggataaggtgttgttgttgttgttgtatttgtctattttattaatgattaatttctgttggagaacttaatt

SEQ ID NO: 267 - DNA, 9719 bp, Artificial Sequence
  Synthetic polynucleotide
ttaaaaatatttaaagacttaattaaaaattattaaatatttcagagatctataaattaatttaacataaatgaaagtgttatcaaatatgtctagctaattgaaaaaaaaaaacttaaataaaaatttctttttacctgtcttattaggtgactaaggatataattgataaacaaaagtaattaattaattataagatctttaactttataaaaaataaataaaaaaatcttttaaaaaaaattcgacaattaaaaagaaattaacagagggagtaacaattttttacattaaaaaataaatttaaaatttgagtttaacggtcgtattatcatttagtgataaattatcgatataaattttaagataattattataaaaattaataaatttattatgataatttataattaaatcaaaatataaaattatttaacaccacgtgcataataatctaattcacaaaaaaaagaggtaatttatatagtctcttttattaccttatttttctgagtagtaataaatagacaccaagtgttaataataaagtttatcctttctcctcctatccgtctctttatttatttttcattacaaactttatcaaatctatcaatttctctctcttctatctttctctttgttctatccatacaacttaaaaatgtggttgtagtctaaaattttgcctctaattactgtctaccgcggtgtacttgacctgtacaattacctttcagatgctattataactagagaaatttagctcaagacttaaaaacaatggaccaagagatgtgctgtttccacaatgaggcacgtgtctcctcggtccagtcacgtgaagatccacgtgcctttactctgagcttgagccttagtagtttttcgtggttctctccctgtcctataaatttgagagcctgtatcttacatcctagacacacagtagtgactagctcattcattacaattcatcaccccagccaccaacccttttttcatgccaaaccacgaatttgcttctaattttcatgccaaaccctttcttctttcttttgagagagacgcaatccgctcctctatcttactggctagatcaattcctttctattaatttgcttctttctcaatttgtacatgccttcgatcttatagacatacatatatctcctaaactgcacatagagatttaaaaaaaaagaacaagttacaagtagaatttttttggcaagaatcgaagaaagtgagtgagagaaaagaatcttcatctttctgcatgttgcgtacagaatctttaaagccaaatcctgctcacgttaacccacgacgctgttccaagattttgttctcttctctggagcttcccaacattcttcctttccctcatccaccacccccactacccaataactcatcatcatcgtacgccacacacatgacatgcatgtatcttcattaattccttagcgaaaccacacgtactctagcttgtggggtagtttttaattattagttattcttatcttgttcaattcatggctgacaacaagcttgttctgttaacattcgccatatgccgtttaatagtaactgtgggattaacggtggtcccggagctgctcgatgtgggactccagggtcgtctcagcgtggacacgttggaactggaggcggcttcggtggatttcgggaggctgagtcgaggggagccttcggaggtagtgcaccctgccacggcggaggatgtggctagggtggtgaaggcggcgttcgagtctccgttcgccgtgtcagcgagggggcacgggcattcgataaacgggcaagccatgataaaagagaagaaaggagtggtgattgaaatgggaaaaagtgatagtggtgaggatggtagtagtattagagtgagtgagaaaggaatgtatgtggacgtgtggggtgggaagttgtggatagatgttttgagtgcaacattggagtatgggctggctcccatgtcttggaccgattacttgtatttgtctgtgggtggaaccctatccaacgctggaattagtggacaaaccttcaatcacggtcctcagatcaccaatgtttatgagctcgatgtcgttacaggtaatttaatatataatataatttgcattcacttttaactaatcacaaatatcattattggtatacttttttaaggtacaatttttgcattcacggttaatttttacaataatagtactatgtttaacatttgacaccttcaaagagaaaaaaaggagttctaccattataaatgattctaaagatggatttatattttcgaaaattaatgtttattatatacatttttaaataatttaaatttgttggtgttattgttgccaaatttgattgttttaccgtaagaaatgatgcttgtgcatgctaataactagttgttcttgttccccaagaggaaaagttaattttcactaattaaacagaggtgtcccactggtttgtcatggtgctgagtacaaacgaatctcgtttatctttagcgtggttaatctcgttgatatcataatgtgtactggtgtgtaacaggaaagggtgagctggtgacatgttcagaagatcgtaactcggagttgttccatgctgttctaggtggtcttggacaatttggaatcatcacaagggctagaattgctctcgaaccagctcctcacagagtgtgtatctctcccacgtactttatctttctttgtctctttttcttactcacacatatacagtacccaattccctctttcctaattgtatgactctcttttcgtactagctcgtgacctcgcacataatatgctaacatttcatgtaataattgaagataaagttataaaaatgaataatattatctgttttcataatgcatacatatacttcatttttattttttagaaacaactcaatgtaaataaaatttaaagtgtaaatattatttctttttttccatcatggaaaaaaaaagtcggttgaacatgatttccatgagatgataggaggggcacacacgatgcgtcttttcttggaaatctttcttcacatcagcgacaaaacctaaaaaaagggtcgttttcgaagggatggtttgggtactcttctaacaatataaagctggaataattatcgtttgcgtgtcgcctgcctgggacattctctgttttaattcatttctcttaacgaactaatatcactatcgattaagggaactgatatcaatgagctataacaatagaatattctcgtctaattaatattattagggtttaatttctatttactgtaaattaatattactataagaaattttacattttcaatcaatcatacatcatcgtggtggtataacttttaaagtgataattactataaaaaggaacatatacttctcatacatgtttatttataattgagagattagataaaatttgtttacacgttcaatagatatattattttctccaataaaattatattagagttagatatatgataaatatttaagtgcaggttcggtggatacgagtactgtattcgaattttgcaaggttttgtaaggaccaggagtatctgatatctctgcatgggaaagcagcaagggagagattcgactatgtggagggtttcgtgatagttgatgaagggctgatcaataattggaggtcttcgttcttttcagctagtaacccagttaaaatcacttccctcaacgctgacggaggtgttttgtactgcttggagattaccaaaaattacgaccaaggaaacgcagattctgttgatgaggtacgtacacacccaatcccacgtacattttctcttctttgtcagtgccttcacttatatataatattattgactgttcatacacttagtgcgctgtcacaataaaatatattcatttaactttcattagtttaattatgtgaagttaccttatttcgtttactaataacgtgttcatatcttatttattgcgtactccacttcgtgtacacattataattgtcattttttatcattttacaccaagaaaataataaataaataagactaataataattttataaaattaatattttattattattaattcatttataaattttgttatttataattaatatgataagcgatataattaaaaaataataattaatgttacatttaaaaattaaaatgataattattttgaaatatttttttctcttgtatgacagttactttaatgttgaagaaaatttagatagaattaaacaaaatgattggacaaaataattaatatattaaagttaaaattaaattatttcagtattatttaagtttgatatttaataaaaataattttttattcgattttacttattttttgattgaattctagattagttgagattcaatttttttaatgagttggagggataggaaaaaaatagttagatagaattaattcttgaaagagtgaaaaaaaaatacattgaagcttttttttattgaaacgtgtaagaatcgagattctaacaaaaaataaaacagggcttaagtagttaagtttttaccaaaatcactccacctagctagctaatgttgcctgtttaatttactttatgtatttttatttttttttcggttacatccatttgtttaaaataattgtttctcaaatatgctacttgatgtccatgttgttcaaattctaaactctagaaaagacatgaaatataagtatgtgtcagaataattaattaagtcttcgggctttttcgtccagtttttgttagttggtcaacacatttatgcttcagagattctataggatttatagggagcaaaatataaaattaacaggcaaacataaaaggacaaaattaatggcgttgatttgaacatcaattaaaaagtaacattgatattcataacaaattaacagacaaatgtgaaagaacaaaaatagcattattcaataccagttgtttttaccacattaaatttgaacgtttagttttgagtcatctgtcctttctctctttatcgttctacccttgagaagatcaacggaagaaatatgtcaattattctgacgaatactctcatatgattatgcgattaatgtcaagattttcttcgttcacaaattcatgcttactttaataattcagtatctgtctgttttatgtttgaagtctgatttaatattgttaatggtatctttaagtaattggtcaaacaattcaattaacaagaaaaatgatatacgctgtccagaggtaatcacattttatttaatttcataatttattgaattaaaaccttggttcttccttcatcgctgtcctcgtatatgattattctctgtacccaaacattgaccagtctctagttgtagaacagaatgcaataaaacatacaaaagaaaacatgtggaagatcttgtgcaatctatcatctcgattcaatcgcaagattgaatgcaacctttacaatagttaattttcactgtttaaaaatgccggcagtccaccagaatattctctcacttgtttttaacttctcttaattaattcttgtcaaagctatatataactgctcacaatagtgggtctcatatcccgacaaaagcaccggctaccttagctagcagctttcctttttcatgcataactatttaatttaagacctagagaggaaaaaagagataaatatagtttaaataagtgatatgatgttatagaaaaataaacataaaatatgttactagagtatttcatttatatatatatatatatactccacttttataaatatatttaaataaatagttatttgtattttgatctactagaatgacgtatgagagatttttttttaatctttaatttttgttattaagtacttatgtttttaaagttaaacaaagttagtctttctattaatattctttacaaaacgtcaaaacctttaagttcattttctgtttaaaatatttataaattatatctattacattatttaaatactttttattcgaagcataccaaccgaaattaaacatcaaaagacattttcttagatttctctttgtacgtttttatggtatgcaggaaatacaagctctattgaaaaagttaaattttataccaacatcggttttcacaacggacttgccttacgtggattttctggatcgtgtacataaggcagagctgaagcttagatccaagggtttatgggatgtacctcatccgtggctcaacctttttgttccaaaatcaaggataggggacttcgacaagggtgtgttcaagggcattcttggaaataagacaagtggacctatcctcatataccctatgaacaaaaacaagtaagtttataaatatatatttccgcatgcatatccatttgttatactatcatattcatccatgtcctagtcatatatatgtagaataaaaccactgcatgtttgcaggcatgcacatatctcctcatatataaaccacatgtctgctgctgatagcctcatatcgactgtcagtgtttagggaagaagaaaagaaaagaaaaagttcaaatgagtaatgaaatagagtatgaagttttgtgatcatatatgaaagagaaaaacctgcaacataatatatattttctacaacgaatattcccaataattatggaactagatgaaaatgtgtgaagattctccacgattgatggacagatagtactattgtcggaattaatggattagggaataaacagaatctagacgtttacattaatcctaataatagatggctgaatctgtttgtttctactttcattgtgtgtattaattaatccaggtcctcgataattcttgaattaaagaagattctgtttgataaatttgtctacacttaattaaacactgacaaaaaaaactaaaatgaattaatttatttttataaattaaaatttacatctcaataaaatattagctatagataacttaaattaagaatgcttaatccaattaagtgaaaataaaaaatatgaaaagaacaagaagcacagtgaggtgcatgtagtggaaagacatggaagacacacgagggttgtattgtagccaacatagcagatgaaaatctgcatcaaagccagctaggaagtgccacgtttattatttcttgaccagaagcaaacaaaatggatggccatgatcatccaactggagagattctggtgtcagaagatcttccatagggacccactcctcgaatggtagggatgtctcctctccactcctcaccttttatactaacctagttccatagacaccgccatatgcatcaacttccaggtcaatatcaatataatatgcacaaataaacaaataaaaaccataataattgcacttagttatgttttttttttttcattttaaaaataccaaaaattaatgataatgatatcacaaataaaaataaaaatgcatgtttgttagagggtatataatataagaaagacaacgcttgtccaaagcatttatatatagagagagagaataagataaaaaattaaatgaattctatgtatcttgccataggtttctgactgataagtcgatggattattaatgtttttgaattagaccacgaattagaaatacttaaaaaagttctattgttatttcaacagagtagtagtaagtaaagtaaatggtttcaagtgtgcagtatagatgaatagaaaaattcaaaagatgattttgggcgatggtgatgtgtaggtgggaccagcgaagctcggtggtgacaccagaagaggatgtgttttacctggtggcatttctaagatcggcattggatactgagacgctggagtacctgactaatcagaaccgtcaaattctgaaattctgccatgatatagagatcaaggtaaaacaatacctgccccattacactacgcagcaggagtggatggaccactttggtgataagtggacccagttcaatgctaggaagatgcaattcgatccccgccgaatcttagccacaggccagcaaatttttcagtttcatccctcactcaccctcaatatgtagaacaaacatgcaaaatggataaataatcttgggttcatgttgagtagcaagtgctgtattattgtaattaggaaatacaaggaggatcatggcaaaaaaagaattagaaggatgtagttgtagtgcactagtgaaggatcaagagttgttgaggtgttgttatctgagggtaataaaattgatgatggagttggatttttgttatgtaatggggtcttgtagcaaattaagtaaggaacccaataaggattaggcccaaagaatataaggagtggtggggcccgctttggaggaggaaaagggcaatgcgcaagtgcacatgagcaccgcccgtctggtttggctgtctcgtttttcaatatagatatcttttattacccatccaaattcctcgtacatataattcttctagatgtattagtctgtatgtttatttcaaatggaaacatttaatcagtgactccttataaaacataatcaacggcatttatgaataaagttaataagttaagagggaaaggaaagaggagaggaaaatgttcaaatgaatcaaatttctcccattaacatttttaataaaattaatatttatcgataaaaaaaatatcaacaagttaagaaaataataataatagacatgtattgctaatataaaagtttccgtacacaattaattaattagaaactatcttaaatatcacttttaacaaagtaataatataaatcaataacataactttttttttatcactataatattaatgtgacatatttgtctattttgagaggttggaaacttggagacgagctctagaaacacatgactttcgcctaaacagaagcaaatcggagtatatggaatgtaagttcaacaaaagtaagagggtatctaactcagatgtgaaaatagaagaccatattatccctcaagtcacacagtttaaatatcttgggtctgtaatacaggatgatggagaaattgaaggggatgtgaatcatcgcattcaagcaggatggatgaaatggagaaaagcatcaggggtgttatgtgatgcaaaggtaccgatcaagctaaagggaaagttttatcggactgcggtaagaccggcgattttgtacggaacagaatgttgggcggtcaagagccaacatgagactaaagtaggtgtagcggagatgaggatgttgcggtggatgtgtggtaagactcgacaggataaaattagaaacggagctattagagagagggttggagtagcgcctattgtagagaagatggtggaaaatagacttaggtgatttgggcatgtagagagaagaccggtagactctgtagtgaggagagtagaccagatggagagaaggcaaacaattcgagacagaggaagacccaaaaaaactataagagaagttatcaagaaggatttcgaacttaatgatttggatagaagtatggtacttgatagaacattatggcagaagttgatccatgtagccgaccccacctagtgggataaggtgttgttgttgttgttgtatttgtctattttattaatgattaatttctgttggagaacttaatt

SEQ ID NO: 268 - DNA, 5758 bp, Artificial Sequence
  Synthetic polynucleotide
ataaatggtagaaatctgtgggttcaaatgttcaattgctggggatcttcgtgatcatgatgattcatacacaatctctagaaacacgtacgcaaatattaattaatcaatttcctttttatagtctcctcacaattcacatgaaacttcatactctattatccgattccatttccatcgtatctttgaatttgacatttgtttgcccaacatgtaattaactttcccttctcatcttaaagatgtaacatgatatatattataacttgtaattaacccaatatttttaactctctatttttacactcatctgacatgtatttttatttttcatttttttttcttatcacatcacctcttacgtgtacaatttttctctttttcttatttctgtcttccataatagtaattaatattcatcggtccgatatgtatacagcccaaaaaagtgtgtaaaatcatttttgtatttctaaccctctctttctcatgcaagctagcttcttctttctatttatagcccttctcccttcacccaccaacacaccacaactccaaactttttcctcttgttctcttcttcttcaacacaactagtcataatccagctcatctctctctccctctctctttgttctctctttctctttctccaaaatggctctaaactacccttttttaacctacttcatactactgctagccgtttgatattcactgtgggaaaaactgagcaatggaaagctccgattctaccagagcttgacattgataacatatcccacaaactccatgatgaccctgaaaccattcaaatggcttcaagggactatggccatttaacgcatgaattcccattagctgtgtttcgtccatcttctatagatgacatagtcaccttgataaaatcttcgtacaatagctttgccccttttgacatagctgcgaggggccaaggccactccactcatggacaagccatggctcgtgatgggattgtggtggacatggccagcctaagaaaacaaagaaatggggttgcgattagtgtctctaaggaccctttgatgggtcactatgctgatgttggaggggaacaactctggattgatgtgctacatgccacacttgaatatggacttgcaccagtttcttggactgattatttgtacttgaccgtgggagggacactttctaatgctggaatcagtggccagagcttccgttatggacctcaaatcagcaacgttcatgaaatggatgtcatcactggtatggagttagttgttttttttaatcaataaatgttaatattattagcttgttagttttttttgaaaaaattgaattaactttcgtttcctcttttctttctttttttaaccacacaattaatctaataactactggtattaagttagtttattttccatttttcatatataagttaggatttctaattaaaattgacatttcgtaccaccactacaaaaaaataatgtatcagtggcacaaaaaaatatattggcatcacttgtttttttagtcattaatattttgtagcatcacaaaaaatatggtgacaagttttctaaaaattacaaattaactgattcgtcagtgatgttaatgattttttagtgcgtcttggcaactaatgttttcatcttatataaaattagaaacaatagcggcaacagcacctgacattgtgtttgtgttttgcgtgtttctatcgcctaatttttgttgagaacgtgttcgtgaaacttggaaaaagagaaaattgaaattttcttgagatatctaccacttaagaaaaacaaatggctgtttccgttttgtctcttatgacatgacatggtacgtcatagatgaagttctgctaaatatatttgatatgatttcttgaacacgttttatatattcccacttcccagttagtgtggttgttgaatctaattaaaacaggaatagtctttgtctacaatatgggtgagcgatgcaaactttccaagggtttagaagttagaactatataggtccacggtcataattttatattcttgattaactttatgttggttaagtcgttcatatttggtcaattcattcatatgagaaaatactgaaatacaaacatggaaaaatgttaattactcttataattggcgcatgcatgcatctaaattatatgattttaataaatagtttttgtcatctacttgatttcaggaaaaggagagttcgtaacatgctcttcacagaagaacttggagttattccacgcggttcttggaggcttgggacaatttggagttatagcaagggcgagaattgctcttgagccagcacccaaaagggtacgtttatagagaattgactagaattttgtcttgtagcttttcctccaccaattcatatagtgacacctaatcgaattgtcatttttttttacggtgaattgtcattttgtaaatctaccaagtggtagttggcacccatatatgtatgaactatagtaccatacatttcattttatgttggtgtgttagtcatccatgatgaacacatacacaaatgaaaataggacgagttatacgtacgtaagggtttgaatcactgaatgtggatttttgaagttgaaagcatattaatcttggtttgaaaaagaaaaaaaaaatcggaagtccctcttgaagttatcatgactcttatattaagccaatagaattagaaaaactataattatgaatgatcatgttaattctttcagtgacttaaaatcttatctacaaaaagtacccttttgaaaaagaccttcacttaagtccatgcatacagtactaatcttacatacttgagagttgagacttgaagcatgaggagatttgaagtctggagaaacaagccaccacatattaattactaccgtattcttatctttatttatccttccaattttgatgggactggttgcacatacattcatacatactaacatacataaatacgtctctctctcatgtatttcattttattatattctatttcgttagtaagtttactagtataagacattattaatggtgaatttttgttggcatgcaggttaagtgggtcagactactttatagtgacttttctgcttttaccaaagaccaggaacgattaatctcaatcaatggaaggaaacaaaagaacgcattggattttctggaagggatgctgctaatgaaccaaggccccataaataattggagatcctctttcttccctctatctgaccatcccagaatagcttctttaataactgaacatagcatcctctactgtcttgaagtggctaaatattatgacgaacaaaccgagttaaatgtggacaaggtaacctcgtctagtcatatctattatatatagttagatcttgtcacatttctttgtttaaaaaataaaataaaaggcacaatcccaaaaagtcaaaagcaaatgcctagatattgtgtgttttcttggatattaattattacaccttaataacccataataatttttttatttttctttgtctctgtaggaaattgaagttttgctccaaggactagcctatatccctggatttaattatgagaaaaatgtctcgtacgttgagttcttgaatagggtccgaagtggagagttgaaacttcagtcacaaggactgtgggaagttcctcacccgtggcttaatttgtttataccaaaatctcaaatcttggattttaattcaggagtattcaaagatatagttcttaaaagaaacatctcctctggaccagtcttggtttatcccatgaatagaaacaagtaagccttgaatgcatgaatcacaatctagtgtcattataattcaggagtgtgtgatgcaatcttttaattttctgaccattcaactcaatatcaattttatttcttttttcaattaaaatgcaaaagagaataataattaataatatgaaatttaattccaggtgggacgataggatgtcagcatctataccagacgaggatgttttctacacagttgggtttttgcactcaagtgggtttgatacttggaaggcatatgatgctcaaaacagagaaattttggagttctgtagagatgctggcatcatggtcaagcaatatcttcccaaccacagcacacaagaagattggacaaaccattttggtgctaaatggatgaaattcttagaaagaaaacatcagtttgatccaagaatgattctatcacctgggcaaaaaatcttccacaaaaaattacagccagtgttttaaatattttccctaataaaaaaagtaaaaatgttttgtggtgggactacctcaattagatggctagctagggacaggtgtacatacagtgtgaccaagaccaagatggcttttgtatgctaaagtttgcattgctagctagagaaattaataaggtggggcattaaaggctgcatgagtacttttggcacctattatgctacatattaccttagatacgttaggttgacaaagtcgtactggtaggtacaagaagcacagttgtctctcacactgtctgtcacccaacttgctatatagtgtgtggagaaattcggatcatattgaagatgctgtgagttatagtcctccaatattaaatgtttaacgattctgtctttctcttatataattttgttttgcattatattactttcgcactggtgcaaacatatatatcaatgattataattaatttatacaatgacgagtataattgtacccaagttgcatgccataatatttgtcaaaaacaaaaagttgtatgccataatcaatccaggttgctagataataagatagatatgaatatgataacataaaatgctattaaagcaacaaataaacaataacacatagtccttatagggttcataattgatcgatgaacctagctagacgttgattttaggttaatttccagcgaggataaaatttattatataaagaaataactaaccaacacaaaataataaaaaattaaaaaaaaacgaagaaacttattttagagatataatttgttttagtatttgattgtaatttgagagattagctaggctctcaccaagtgagatctagagtatattcttaagaaaatatttataataaagaacccttaaacattttgcaaaacaaagggtggaattaatattaacaacaataattataatatcttgaaaattttatgaaaataatatatatatatatatatatatagagagagagagagagagagagagaaaattctcacaaacaatttttatctgttatttcaaattggtgtatgactccttagtccttagttcatttgtttgcacccagtcctgtcttaggtagttgattttatagttaggtaaattaatttctcgcactcttcgcttgattgtcatttatgggttgaactgttgaagtgattttatattttttaataaatttcacctgcaaaaaaactcaccattagcatacgccccccccccccccccccccccctctcccaaaaaaaaaaaaaaaacgaaagaagattaattagaaagaataaggtcgtgaaatgatgttacaaataaggcatatcagaatcagacgcaagggaagaataaaaacgttacaacaattcgcgcacaatgcaccccaaaaaaaaaatgacaggcacacataccttaaggaagaagaatcaacgctttca

SEQ ID NO: 269 - DNA, 5901 bp, Artificial Sequence
  Synthetic polynucleotide
atttagcatccctccctttgcacaatgtacaatttgggttttgaataatttttgtcacaccttcatttcgtgggactacttctctaatctatacccatcctggtgaaaaataaagggagcgagttacttacttaattaaacatacttaagtttctctctgactctctctcctctttttaattaatttatcataaacaaatatgtgtgcgagtattaaacccgtgcaaaatattagtattattgtttaattttttttccttctcatcaatcataaatatactttttaatacaaaataaaaaatagttaactcagaagatttcttcacttaatcacttcgattcaatattaaaaatcaatccacgctttgttgttttttttcccatgacttatcacgtacatttattatttattatttttctgatgttcttactataaagggaatcactatttgtcacacacaaaactataaagggaatcaaatgatcaattcttatttaaaaactctattaattaaaattacaattacaacaaaaccctaattttatcctccttataattaaacctccacattctctctctctctatcaatacatgtgtttctcaaattaaatattttccatatcctccttttatcatgcaaagtcctcttccattctatatatagcccctacctcctccacctcctttccccactacaacacacaccaacaatcaaatcaatccatccaacctagacatctctcatcttctccaaattaacaaaaatggtagctgggaaatacccttcccccacatacttcatcctcctgctcataaccataacacgtttgatctccacagtgggcaagacctcccaacgccgcctccggaactcgcctcggtctccctcgatgacaccatcttcagcaagctccgcaacgacccagaggccctccaggggagggcctccagggactacgggaacctcgtccgcgaggttccctcggcggtcttccacccgacctcgtcgagcgacatcgcgaggctgatcaagctgtcgtacaacggttctgtccccttcaagatagcggcgagggggcaagggcactcgacgaggggccaggcgatggtacgtgatggggtggtggtggacatggccgggttcagagagagagggaatggagagggaataagggttgtgatgagtgttgttgtggaccctaataataagaatggttatggttactattatgctgatgttggaggggaacagttgtggatcgatgtgctaaacgccacgcttgagcatggacttgcacctatgtcctggactgattacttgtacttgacggtgggaggaactctctccaatgctggcatcagtggccagacattccgctatggtcctcaaatcaccactgtccgccaaatggacgtcatcactggtaagacaactttcaatttattcagttaattttatcatataattttaccaaatacttataaaccatatcagaaacttttaatttaatcaactaactcacaattagtttaatcatatacttttaatttaatccactaacttataaatttgtaacttttcagcttggaggtttgtaggttataagtctcaactttccactaacttataagttagttttagttttattgtatgtggtacttttgaaaattcaaggattttggtactataataactcgttcaactgttggcttagtatcaaaactcttggattttcaagtgtacttcaacaaccatcttaatttaattgatcagggttttaatattgtgaaaattggtcattggacaacttggaaagtgacacagcttggaaaagaaggaaagagggagatgggaagggaaaagaaagaaaataacttttaaaattagttgcgtgaaaaaattaaggttgctgaattaaattatggttcaccacgactctaattgtggcaacccaacgtgccgtggttgtggatattttcagaactttattgcaacttcggttatagtggcgtttgttcaattcattttttaatgtatcagactgtgattgcgattgaaattttataaaatctttttttttttaaacttgttcttttgattaggattaggaatttcagaaacttgattctatttcatatacttttttttaatgtaataccgaattagtggttgataaacgagtctttgtctacaaatttggtgaatgttagcaaccgctttccatctggtcccatgcttgaaaattttcttaaccatggaaattagttcacacggacagtcatagccttcaattcttgattaattgtttccttttctaaaatatggtgatactattatattattggtccaaggtcttgttttggtcaaatttttttattagaaataaacgggctgctgaattttaatttactcaagtgtttcttaaagaatatgtatgcatgcatgcaattatatattattattattatcattactgttatgtttaatcaagtttaatttggtttggttcaggaaagggagaatttgtgacttgctctcagcagacgaattcggagttgttccacgcggttctgggggcttaggacaatttggaattataacaagggcaagaatcgctcttgccccagctcccaagagggtacgtttaaaatcttcaagaattgactaggactttgtcttgttgcttcttcctccaacatctctcacatagtaacgccaatttctgcatatgttacattattaattcaaccatcaagctttagggaagcatcaaatgtccttgtcctaaatgctttatgtcatcatttttcttggcaccctttcgtttcacattgtgttagtgcatattagtcatccatgaaagacacatgaaaataaaatttgttggaaaaatataaatcatattttcataagtcttttgaaatatacagtaaccttagagaccttaagcaattaagccaataaaaagggtcgtattatcaaaccccaactaacaactattagaaaatactaacaagtataggtgcatacataaatatgtttccactagaaagtatataaagttggtgagatgattcattttgaattttagtaccttaattatttaactttatccttctatttgatgggactcatcgcataagccatacatatatacataatcatgcgttcattattgtttttcattatgagttaatgagttgattgtatgaactaatggtgaatttctcattggcaggttaaatgggtgagacttttgtacaatgacttttctgctttcaccaaagaccaggaacaactaatctcaatcactagaaggaaacaaaatattgcactggattatttggaaggattgctgctaatgcaccaaggacccataaataattggagatcttctttcttccctttagccgaccatgcccgaataatttcgctagtaactaaacacagcgtcctctattgcctagaagttgccaaatattatgatggccaaaatgaaaacaatgtggacaaggtaccgtctccattcatgtgcatttgccttcatgatgtgtcttttatttcttttcttttaattttttgtctcaccttatataataaccctttgtcacactcaatattattatatttttaaagagtttaatggttatacactatttttactttatttaattataaattatcattgatatattttttaagataattatcataaaagttaataaatttatcagttataattgaatgattgtataaaattatttaatttatattgcataatttattttctatttgtaatctttttttactataagttgttatattgtaagtaattaatattctcattttcatgattgtgtaggaactcaaagttttactacaaggactgagctatatccctggattttactatgaaaaagatgtctcgtatgttgagttcttgaatagagttcgaagtggagagttgaagctacaatcacaaggactatgggatgttcctcacccatggcttaatttgtttataccgaaatctcaaatcatggaatttgactcgggcgtgttcaagaatatcatccttaaacgaaacattaccacaggacccgtcttggtttaccccatgaatagaaacaagtaattgagcttaactaactaatctcaatttgtattgttatcattaggaaaaatgttaattggtacgaaaactatatactacactattttcattaaaattcatgaaagtgaaatttctctttcctaaaataacttctttctcttaaaatgaatttttgtttttctcaatctccatcaattacttatttccttttttgaacgtttgaaaagtcattcataacttttttttcataaaaaggtcatttcgtaccaattaaatagcattgcctttattatcatatgtacacaattcttctcttcactcacttctctctttttttttcccattaaaattgtaaaacaaataatcaggtgggacaataggatgtcagcatcaatacccgacgaggatatcttctacacagttggatttttgcattcaagtgggtttgataattggaaggcctatgatgctcaaaataaagaaattctacaattttgtaacgattctgggatcaaggttaagcaatatcttccccactaccgcacacaagaagattggacaaaccattttggccctaaatggaggacttttgtagaaagaaaacaccagtttgatccaaaaatgattctatcacctggacaaagaatctttaacaattaaactagctttaaaaaatatatataatatggtgggactacccaagttagctagctggctgatctcaagtgtacacataggacccagaattcagatgatagcctttgtacttgtttttgttaagagggtggggttaaaagctgcatgactttggcatatatgtagatcaggttacacatactttagatacgttaggttgacaaaatcatgtgtgaaagatgcacacagctagctgtgtacctttctttctctctctctctttctttctctctgtccctcaatttgtctatcactaaaaagattactatagtttagaacctagtgaagatggaaaaaaatcattatatagaggatttaattttatcacacgttctaatcatatacattaatattcttaaatgtgcaatgagtgtgttcggtgccttaatgattctttatctttgttaattgttagtatattatagggttttgtttttcccttcctaattttgtaacggccatccctactagcaataattgagatcctaggttaactaaggaagagcattattgtgtccaaattgagagtcctagctgtatgccataataataaatcatcgtaagttgctagatagatgtgataacgccaaatgccttcaaatactattattaatctccatcgcgagatccttcgttgtgattatgtagaaaagattacgctgcttttacaagagaatactccaagaaagcaagtgattgctccttaatataagaatcatacaataaacaaatggtgttgtagtccataaagtgtatttaatatttgatgaaagagtgtgtagacatcaaagtgataaaactaataaatttaagtttgatgcaattcgaagtcgtagatacttaattaatctctaaatcatattagttttaaaccatacagattttaatatgttgaatggattaatctttaattgtgcattggaaaatattataattcataaaaaaagaaataaagtttagacatgaataattacggactaatgaatgcaacctatatatactacgtctctcaattttgcggagaatttaggaatattatagtatttcactgaaaggacacacaagtggcaatgatgaatattttaattt

SEQ ID NO: 270 - DNA, 5760 bp, Artificial Sequence
  Synthetic polynucleotide
ataaatggtagaaatctgtgggttcaaatgttcaattgctggggatcttcgtgatcatgatgattcatacacaatctctagaaacacgtacgcaaatattaattaatcaatttcctttttatagtctcctcacaattcacatgaaacttcatactctattatccgattccatttccatcgtatctttgaatttgacatttgtttgcccaacatgtaattaactttcccttctcatcttaaagatgtaacatgatatatattataacttgtaattaacccaatatttttaactctctatttttacactcatctgacatgtatttttatttttcatttttttttcttatcacatcacctcttacgtgtacaatttttctctttttcttatttctgtcttccataatagtaattaatattcatcggtccgatatgtatacagcccaaaaaagtgtgtaaaatcatttttgtatttctaaccctctctttctcatgcaagctagcttcttctttctatttatagcccttctcccttcacccaccaacacaccacaactccaaactttttcctcttgttctcttcttcttcaacacaactagtcataatccagctcatctctctctccctctctctttgttctctctttctctttctccaaaatggctctaaactacccttttttaacctacttcatactactgctagtaacgtttgatattcactgtgggaaaaactgagcaatggaaagctccgattctaccagagcttgacattgataacatatcccacaaactccatgatgaccctgaaaccattcaaatggcttcaagggactatggccatttaacgcatgaattcccattagctgtgtttcgtccatcttctatagatgacatagtcaccttgataaaatcttcgtacaatagctttgccccttttgacatagctgcgaggggccaaggccactccactcatggacaagccatggctcgtgatgggattgtggtggacatggccagcctaagaaaacaaagaaatggggttgcgattagtgtctctaaggaccctttgatgggtcactatgctgatgttggaggggaacaactctggattgatgtgctacatgccacacttgaatatggacttgcaccagtttcttggactgattatttgtacttgaccgtgggagggacactttctaatgctggaatcagtggccagagcttccgttatggacctcaaatcagcaacgttcatgaaatggatgtcatcactggtatggagttagttgttttttttaatcaataaatgttaatattattagcttgttagttttttttgaaaaaattgaattaactttcgtttcctcttttctttctttttttaaccacacaattaatctaataactactggtattaagttagtttattttccatttttcatatataagttaggatttctaattaaaattgacatttcgtaccaccactacaaaaaaataatgtatcagtggcacaaaaaaatatattggcatcacttgtttttttagtcattaatattttgtagcatcacaaaaaatatggtgacaagttttctaaaaattacaaattaactgattcgtcagtgatgttaatgattttttagtgcgtcttggcaactaatgttttcatcttatataaaattagaaacaatagcggcaacagcacctgacattgtgtttgtgttttgcgtgtttctatcgcctaatttttgttgagaacgtgttcgtgaaacttggaaaaagagaaaattgaaattttcttgagatatctaccacttaagaaaaacaaatggctgtttccgttttgtctcttatgacatgacatggtacgtcatagatgaagttctgctaaatatatttgatatgatttcttgaacacgttttatatattcccacttcccagttagtgtggttgttgaatctaattaaaacaggaatagtctttgtctacaatatgggtgagcgatgcaaactttccaagggtttagaagttagaactatataggtccacggtcataattttatattcttgattaactttatgttggttaagtcgttcatatttggtcaattcattcatatgagaaaatactgaaatacaaacatggaaaaatgttaattactcttataattggcgcatgcatgcatctaaattatatgattttaataaatagtttttgtcatctacttgatttcaggaaaaggagagttcgtaacatgctcttcacagaagaacttggagttattccacgcggttcttggaggcttgggacaatttggagttatagcaagggcgagaattgctcttgagccagcacccaaaagggtacgtttatagagaattgactagaattttgtcttgtagcttttcctccaccaattcatatagtgacacctaatcgaattgtcatttttttttacggtgaattgtcattttgtaaatctaccaagtggtagttggcacccatatatgtatgaactatagtaccatacatttcattttatgttggtgtgttagtcatccatgatgaacacatacacaaatgaaaataggacgagttatacgtacgtaagggtttgaatcactgaatgtggatttttgaagttgaaagcatattaatcttggtttgaaaaagaaaaaaaaaatcggaagtccctcttgaagttatcatgactcttatattaagccaatagaattagaaaaactataattatgaatgatcatgttaattctttcagtgacttaaaatcttatctacaaaaagtacccttttgaaaaagaccttcacttaagtccatgcatacagtactaatcttacatacttgagagttgagacttgaagcatgaggagatttgaagtctggagaaacaagccaccacatattaattactaccgtattcttatctttatttatccttccaattttgatgggactggttgcacatacattcatacatactaacatacataaatacgtctctctctcatgtatttcattttattatattctatttcgttagtaagtttactagtataagacattattaatggtgaatttttgttggcatgcaggttaagtgggtcagactactttatagtgacttttctgcttttaccaaagaccaggaacgattaatctcaatcaatggaaggaaacaaaagaacgcattggattttctggaagggatgctgctaatgaaccaaggccccataaataattggagatcctctttcttccctctatctgaccatcccagaatagcttctttaataactgaacatagcatcctctactgtcttgaagtggctaaatattatgacgaacaaaccgagttaaatgtggacaaggtaacctcgtctagtcatatctattatatatagttagatcttgtcacatttctttgtttaaaaaataaaataaaaggcacaatcccaaaaagtcaaaagcaaatgcctagatattgtgtgttttcttggatattaattattacaccttaataacccataataatttttttatttttctttgtctctgtaggaaattgaagttttgctccaaggactagcctatatccctggatttaattatgagaaaaatgtctcgtacgttgagttcttgaatagggtccgaagtggagagttgaaacttcagtcacaaggactgtgggaagttcctcacccgtggcttaatttgtttataccaaaatctcaaatcttggattttaattcaggagtattcaaagatatagttcttaaaagaaacatctcctctggaccagtcttggtttatcccatgaatagaaacaagtaagccttgaatgcatgaatcacaatctagtgtcattataattcaggagtgtgtgatgcaatcttttaattttctgaccattcaactcaatatcaattttatttcttttttcaattaaaatgcaaaagagaataataattaataatatgaaatttaattccaggtgggacgataggatgtcagcatctataccagacgaggatgttttctacacagttgggtttttgcactcaagtgggtttgatacttggaaggcatatgatgctcaaaacagagaaattttggagttctgtagagatgctggcatcatggtcaagcaatatcttcccaaccacagcacacaagaagattggacaaaccattttggtgctaaatggatgaaattcttagaaagaaaacatcagtttgatccaagaatgattctatcacctgggcaaaaaatcttccacaaaaaattacagccagtgttttaaatattttccctaataaaaaaagtaaaaatgttttgtggtgggactacctcaattagatggctagctagggacaggtgtacatacagtgtgaccaagaccaagatggcttttgtatgctaaagtttgcattgctagctagagaaattaataaggtggggcattaaaggctgcatgagtacttttggcacctattatgctacatattaccttagatacgttaggttgacaaagtcgtactggtaggtacaagaagcacagttgtctctcacactgtctgtcacccaacttgctatatagtgtgtggagaaattcggatcatattgaagatgctgtgagttatagtcctccaatattaaatgtttaacgattctgtctttctcttatataattttgttttgcattatattactttcgcactggtgcaaacatatatatcaatgattataattaatttatacaatgacgagtataattgtacccaagttgcatgccataatatttgtcaaaaacaaaaagttgtatgccataatcaatccaggttgctagataataagatagatatgaatatgataacataaaatgctattaaagcaacaaataaacaataacacatagtccttatagggttcataattgatcgatgaacctagctagacgttgattttaggttaatttccagcgaggataaaatttattatataaagaaataactaaccaacacaaaataataaaaaattaaaaaaaaacgaagaaacttattttagagatataatttgttttagtatttgattgtaatttgagagattagctaggctctcaccaagtgagatctagagtatattcttaagaaaatatttataataaagaacccttaaacattttgcaaaacaaagggtggaattaatattaacaacaataattataatatcttgaaaattttatgaaaataatatatatatatatatatatatagagagagagagagagagagagagaaaattctcacaaacaatttttatctgttatttcaaattggtgtatgactccttagtccttagttcatttgtttgcacccagtcctgtcttaggtagttgattttatagttaggtaaattaatttctcgcactcttcgcttgattgtcatttatgggttgaactgttgaagtgattttatattttttaataaatttcacctgcaaaaaaactcaccattagcatacgccccccccccccccccccccccctctcccaaaaaaaaaaaaaaaacgaaagaagattaattagaaagaataaggtcgtgaaatgatgttacaaataaggcatatcagaatcagacgcaagggaagaataaaaacgttacaacaattcgcgcacaatgcaccccaaaaaaaaaatgacaggcacacataccttaaggaagaagaatcaacgctttca

SEQ ID NO: 271 - DNA, 5757 bp, Artificial Sequence
  Synthetic polynucleotide
ataaatggtagaaatctgtgggttcaaatgttcaattgctggggatcttcgtgatcatgatgattcatacacaatctctagaaacacgtacgcaaatattaattaatcaatttcctttttatagtctcctcacaattcacatgaaacttcatactctattatccgattccatttccatcgtatctttgaatttgacatttgtttgcccaacatgtaattaactttcccttctcatcttaaagatgtaacatgatatatattataacttgtaattaacccaatatttttaactctctatttttacactcatctgacatgtatttttatttttcatttttttttcttatcacatcacctcttacgtgtacaatttttctctttttcttatttctgtcttccataatagtaattaatattcatcggtccgatatgtatacagcccaaaaaagtgtgtaaaatcatttttgtatttctaaccctctctttctcatgcaagctagcttcttctttctatttatagcccttctcccttcacccaccaacacaccacaactccaaactttttcctcttgttctcttcttcttcaacacaactagtcataatccagctcatctctctctccctctctctttgttctctctttctctttctccaaaatggctctaaactacccttttttaacctacttcatactactgctagtaacccgtttgatattcactgtgggaaaaactgagcaatggaaagctccgattctaccagagcttgacattgataacatatcccacaaactccatgatgaccctgaaaccaatggcttcaagggactatggccatttaacgcatgaattcccattagctgtgtttcgtccatcttctatagatgacatagtcaccttgataaaatcttcgtacaatagctttgccccttttgacatagctgcgaggggccaaggccactccactcatggacaagccatggctcgtgatgggattgtggtggacatggccagcctaagaaaacaaagaaatggggttgcgattagtgtctctaaggaccctttgatgggtcactatgctgatgttggaggggaacaactctggattgatgtgctacatgccacacttgaatatggacttgcaccagtttcttggactgattatttgtacttgaccgtgggagggacactttctaatgctggaatcagtggccagagcttccgttatggacctcaaatcagcaacgttcatgaaatggatgtcatcactggtatggagttagttgttttttttaatcaataaatgttaatattattagcttgttagttttttttgaaaaaattgaattaactttcgtttcctcttttctttctttttttaaccacacaattaatctaataactactggtattaagttagtttattttccatttttcatatataagttaggatttctaattaaaattgacatttcgtaccaccactacaaaaaaataatgtatcagtggcacaaaaaaatatattggcatcacttgtttttttagtcattaatattttgtagcatcacaaaaaatatggtgacaagttttctaaaaattacaaattaactgattcgtcagtgatgttaatgattttttagtgcgtcttggcaactaatgttttcatcttatataaaattagaaacaatagcggcaacagcacctgacattgtgtttgtgttttgcgtgtttctatcgcctaatttttgttgagaacgtgttcgtgaaacttggaaaaagagaaaattgaaattttcttgagatatctaccacttaagaaaaacaaatggctgtttccgttttgtctcttatgacatgacatggtacgtcatagatgaagttctgctaaatatatttgatatgatttcttgaacacgttttatatattcccacttcccagttagtgtggttgttgaatctaattaaaacaggaatagtctttgtctacaatatgggtgagcgatgcaaactttccaagggtttagaagttagaactatataggtccacggtcataattttatattcttgattaactttatgttggttaagtcgttcatatttggtcaattcattcatatgagaaaatactgaaatacaaacatggaaaaatgttaattactcttataattggcgcatgcatgcatctaaattatatgattttaataaatagtttttgtcatctacttgatttcaggaaaaggagagttcgtaacatgctcttcacagaagaacttggagttattccacgcggttcttggaggcttgggacaatttggagttatagcaagggcgagaattgctcttgagccagcacccaaaagggtacgtttatagagaattgactagaattttgtcttgtagcttttcctccaccaattcatatagtgacacctaatcgaattgtcatttttttttacggtgaattgtcattttgtaaatctaccaagtggtagttggcacccatatatgtatgaactatagtaccatacatttcattttatgttggtgtgttagtcatccatgatgaacacatacacaaatgaaaataggacgagttatacgtacgtaagggtttgaatcactgaatgtggatttttgaagttgaaagcatattaatcttggtttgaaaaagaaaaaaaaaatcggaagtccctcttgaagttatcatgactcttatattaagccaatagaattagaaaaactataattatgaatgatcatgttaattctttcagtgacttaaaatcttatctacaaaaagtacccttttgaaaaagaccttcacttaagtccatgcatacagtactaatcttacatacttgagagttgagacttgaagcatgaggagatttgaagtctggagaaacaagccaccacatattaattactaccgtattcttatctttatttatccttccaattttgatgggactggttgcacatacattcatacatactaacatacataaatacgtctctctctcatgtatttcattttattatattctatttcgttagtaagtttactagtataagacattattaatggtgaatttttgttggcatgcaggttaagtgggtcagactactttatagtgacttttctgcttttaccaaagaccaggaacgattaatctcaatcaatggaaggaaacaaaagaacgcattggattttctggaagggatgctgctaatgaaccaaggccccataaataattggagatcctctttcttccctctatctgaccatcccagaatagcttctttaataactgaacatagcatcctctactgtcttgaagtggctaaatattatgacgaacaaaccgagttaaatgtggacaaggtaacctcgtctagtcatatctattatatatagttagatcttgtcacatttctttgtttaaaaaataaaataaaaggcacaatcccaaaaagtcaaaagcaaatgcctagatattgtgtgttttcttggatattaattattacaccttaataacccataataatttttttatttttctttgtctctgtaggaaattgaagttttgctccaaggactagcctatatccctggatttaattatgagaaaaatgtctcgtacgttgagttcttgaatagggtccgaagtggagagttgaaacttcagtcacaaggactgtgggaagttcctcacccgtggcttaatttgtttataccaaaatctcaaatcttggattttaattcaggagtattcaaagatatagttcttaaaagaaacatctcctctggaccagtcttggtttatcccatgaatagaaacaagtaagccttgaatgcatgaatcacaatctagtgtcattataattcaggagtgtgtgatgcaatcttttaattttctgaccattcaactcaatatcaattttatttcttttttcaattaaaatgcaaaagagaataataattaataatatgaaatttaattccaggtgggacgataggatgtcagcatctataccagacgaggatgttttctacacagttgggtttttgcactcaagtgggtttgatacttggaaggcatatgatgctcaaaacagagaaattttggagttctgtagagatgctggcatcatggtcaagcaatatcttcccaaccacagcacacaagaagattggacaaaccattttggtgctaaatggatgaaattcttagaaagaaaacatcagtttgatccaagaatgattctatcacctgggcaaaaaatcttccacaaaaaattacagccagtgttttaaatattttccctaataaaaaaagtaaaaatgttttgtggtgggactacctcaattagatggctagctagggacaggtgtacatacagtgtgaccaagaccaagatggcttttgtatgctaaagtttgcattgctagctagagaaattaataaggtggggcattaaaggctgcatgagtacttttggcacctattatgctacatattaccttagatacgttaggttgacaaagtcgtactggtaggtacaagaagcacagttgtctctcacactgtctgtcacccaacttgctatatagtgtgtggagaaattcggatcatattgaagatgctgtgagttatagtcctccaatattaaatgtttaacgattctgtctttctcttatataattttgttttgcattatattactttcgcactggtgcaaacatatatatcaatgattataattaatttatacaatgacgagtataattgtacccaagttgcatgccataatatttgtcaaaaacaaaaagttgtatgccataatcaatccaggttgctagataataagatagatatgaatatgataacataaaatgctattaaagcaacaaataaacaataacacatagtccttatagggttcataattgatcgatgaacctagctagacgttgattttaggttaatttccagcgaggataaaatttattatataaagaaataactaaccaacacaaaataataaaaaattaaaaaaaaacgaagaaacttattttagagatataatttgttttagtatttgattgtaatttgagagattagctaggctctcaccaagtgagatctagagtatattcttaagaaaatatttataataaagaacccttaaacattttgcaaaacaaagggtggaattaatattaacaacaataattataatatcttgaaaattttatgaaaataatatatatatatatatatatatagagagagagagagagagagagagaaaattctcacaaacaatttttatctgttatttcaaattggtgtatgactccttagtccttagttcatttgtttgcacccagtcctgtcttaggtagttgattttatagttaggtaaattaatttctcgcactcttcgcttgattgtcatttatgggttgaactgttgaagtgattttatattttttaataaatttcacctgcaaaaaaactcaccattagcatacgccccccccccccccccccccccctctcccaaaaaaaaaaaaaaaacgaaagaagattaattagaaagaataaggtcgtgaaatgatgttacaaataaggcatatcagaatcagacgcaagggaagaataaaaacgttacaacaattcgcgcacaatgcaccccaaaaaaaaaatgacaggcacacataccttaaggaagaagaatcaacgctttca

SEQ ID NO: 272 - DNA, 5756 bp, Artificial Sequence
  Synthetic polynucleotide
ataaatggtagaaatctgtgggttcaaatgttcaattgctggggatcttcgtgatcatgatgattcatacacaatctctagaaacacgtacgcaaatattaattaatcaatttcctttttatagtctcctcacaattcacatgaaacttcatactctattatccgattccatttccatcgtatctttgaatttgacatttgtttgcccaacatgtaattaactttcccttctcatcttaaagatgtaacatgatatatattataacttgtaattaacccaatatttttaactctctatttttacactcatctgacatgtatttttatttttcatttttttttcttatcacatcacctcttacgtgtacaatttttctctttttcttatttctgtcttccataatagtaattaatattcatcggtccgatatgtatacagcccaaaaaagtgtgtaaaatcatttttgtatttctaaccctctctttctcatgcaagctagcttcttctttctatttatagcccttctcccttcacccaccaacacaccacaactccaaactttttcctcttgttctcttcttcttcaacacaactagtcataatccagctcatctctctctccctctctctttgttctctctttctctttctccaaaatggctctaaactacccttttttaacctacttcatactactgctacgtttgatattcactgtgggaaaaactgagcaatggaaagctccgattctaccagagcttgacattgataacatatcccacaaactccatgatgaccctgaaaccattcaaatggcttcaagggactatggccatttaacgcatgaattcccattagctgtgtttcgtccatcttctatagatgacatagtcaccttgataaaatcttcgtacaatagctttgccccttttgacatagctgcgaggggccaaggccactccactcatggacaagccatggctcgtgatgggattgtggtggacatggccagcctaagaaaacaaagaaatggggttgcgattagtgtctctaaggaccctttgatgggtcactatgctgatgttggaggggaacaactctggattgatgtgctacatgccacacttgaatatggacttgcaccagtttcttggactgattatttgtacttgaccgtgggagggacactttctaatgctggaatcagtggccagagcttccgttatggacctcaaatcagcaacgttcatgaaatggatgtcatcactggtatggagttagttgttttttttaatcaataaatgttaatattattagcttgttagttttttttgaaaaaattgaattaactttcgtttcctcttttctttctttttttaaccacacaattaatctaataactactggtattaagttagtttattttccatttttcatatataagttaggatttctaattaaaattgacatttcgtaccaccactacaaaaaaataatgtatcagtggcacaaaaaaatatattggcatcacttgtttttttagtcattaatattttgtagcatcacaaaaaatatggtgacaagttttctaaaaattacaaattaactgattcgtcagtgatgttaatgattttttagtgcgtcttggcaactaatgttttcatcttatataaaattagaaacaatagcggcaacagcacctgacattgtgtttgtgttttgcgtgtttctatcgcctaatttttgttgagaacgtgttcgtgaaacttggaaaaagagaaaattgaaattttcttgagatatctaccacttaagaaaaacaaatggctgtttccgttttgtctcttatgacatgacatggtacgtcatagatgaagttctgctaaatatatttgatatgatttcttgaacacgttttatatattcccacttcccagttagtgtggttgttgaatctaattaaaacaggaatagtctttgtctacaatatgggtgagcgatgcaaactttccaagggtttagaagttagaactatataggtccacggtcataattttatattcttgattaactttatgttggttaagtcgttcatatttggtcaattcattcatatgagaaaatactgaaatacaaacatggaaaaatgttaattactcttataattggcgcatgcatgcatctaaattatatgattttaataaatagtttttgtcatctacttgatttcaggaaaaggagagttcgtaacatgctcttcacagaagaacttggagttattccacgcggttcttggaggcttgggacaatttggagttatagcaagggcgagaattgctcttgagccagcacccaaaagggtacgtttatagagaattgactagaattttgtcttgtagcttttcctccaccaattcatatagtgacacctaatcgaattgtcatttttttttacggtgaattgtcattttgtaaatctaccaagtggtagttggcacccatatatgtatgaactatagtaccatacatttcattttatgttggtgtgttagtcatccatgatgaacacatacacaaatgaaaataggacgagttatacgtacgtaagggtttgaatcactgaatgtggatttttgaagttgaaagcatattaatcttggtttgaaaaagaaaaaaaaaatcggaagtccctcttgaagttatcatgactcttatattaagccaatagaattagaaaaactataattatgaatgatcatgttaattctttcagtgacttaaaatcttatctacaaaaagtacccttttgaaaaagaccttcacttaagtccatgcatacagtactaatcttacatacttgagagttgagacttgaagcatgaggagatttgaagtctggagaaacaagccaccacatattaattactaccgtattcttatctttatttatccttccaattttgatgggactggttgcacatacattcatacatactaacatacataaatacgtctctctctcatgtatttcattttattatattctatttcgttagtaagtttactagtataagacattattaatggtgaatttttgttggcatgcaggttaagtgggtcagactactttatagtgacttttctgcttttaccaaagaccaggaacgattaatctcaatcaatggaaggaaacaaaagaacgcattggattttctggaagggatgctgctaatgaaccaaggccccataaataattggagatcctctttcttccctctatctgaccatcccagaatagcttctttaataactgaacatagcatcctctactgtcttgaagtggctaaatattatgacgaacaaaccgagttaaatgtggacaaggtaacctcgtctagtcatatctattatatatagttagatcttgtcacatttctttgtttaaaaaataaaataaaaggcacaatcccaaaaagtcaaaagcaaatgcctagatattgtgtgttttcttggatattaattattacaccttaataacccataataatttttttatttttctttgtctctgtaggaaattgaagttttgctccaaggactagcctatatccctggatttaattatgagaaaaatgtctcgtacgttgagttcttgaatagggtccgaagtggagagttgaaacttcagtcacaaggactgtgggaagttcctcacccgtggcttaatttgtttataccaaaatctcaaatcttggattttaattcaggagtattcaaagatatagttcttaaaagaaacatctcctctggaccagtcttggtttatcccatgaatagaaacaagtaagccttgaatgcatgaatcacaatctagtgtcattataattcaggagtgtgtgatgcaatcttttaattttctgaccattcaactcaatatcaattttatttcttttttcaattaaaatgcaaaagagaataataattaataatatgaaatttaattccaggtgggacgataggatgtcagcatctataccagacgaggatgttttctacacagttgggtttttgcactcaagtgggtttgatacttggaaggcatatgatgctcaaaacagagaaattttggagttctgtagagatgctggcatcatggtcaagcaatatcttcccaaccacagcacacaagaagattggacaaaccattttggtgctaaatggatgaaattcttagaaagaaaacatcagtttgatccaagaatgattctatcacctgggcaaaaaatcttccacaaaaaattacagccagtgttttaaatattttccctaataaaaaaagtaaaaatgttttgtggtgggactacctcaattagatggctagctagggacaggtgtacatacagtgtgaccaagaccaagatggcttttgtatgctaaagtttgcattgctagctagagaaattaataaggtggggcattaaaggctgcatgagtacttttggcacctattatgctacatattaccttagatacgttaggttgacaaagtcgtactggtaggtacaagaagcacagttgtctctcacactgtctgtcacccaacttgctatatagtgtgtggagaaattcggatcatattgaagatgctgtgagttatagtcctccaatattaaatgtttaacgattctgtctttctcttatataattttgttttgcattatattactttcgcactggtgcaaacatatatatcaatgattataattaatttatacaatgacgagtataattgtacccaagttgcatgccataatatttgtcaaaaacaaaaagttgtatgccataatcaatccaggttgctagataataagatagatatgaatatgataacataaaatgctattaaagcaacaaataaacaataacacatagtccttatagggttcataattgatcgatgaacctagctagacgttgattttaggttaatttccagcgaggataaaatttattatataaagaaataactaaccaacacaaaataataaaaaattaaaaaaaaacgaagaaacttattttagagatataatttgttttagtatttgattgtaatttgagagattagctaggctctcaccaagtgagatctagagtatattcttaagaaaatatttataataaagaacccttaaacattttgcaaaacaaagggtggaattaatattaacaacaataattataatatcttgaaaattttatgaaaataatatatatatatatatatatatagagagagagagagagagagagagaaaattctcacaaacaatttttatctgttatttcaaattggtgtatgactccttagtccttagttcatttgtttgcacccagtcctgtcttaggtagttgattttatagttaggtaaattaatttctcgcactcttcgcttgattgtcatttatgggttgaactgttgaagtgattttatattttttaataaatttcacctgcaaaaaaactcaccattagcatacgccccccccccccccccccccccctctcccaaaaaaaaaaaaaaaacgaaagaagattaattagaaagaataaggtcgtgaaatgatgttacaaataaggcatatcagaatcagacgcaagggaagaataaaaacgttacaacaattcgcgcacaatgcaccccaaaaaaaaaatgacaggcacacataccttaaggaagaagaatcaacgctttca

SEQ ID NO: 273 - DNA, 7395 bp, Artificial Sequence; identical to SEQ ID NO: 139
  Synthetic polynucleotide

SEQ ID NO: 274 - DNA, 5907 bp, Artificial Sequence
  Synthetic polynucleotide
atttagcatccctccctttgcacaatgtacaatttgggttttgaataatttttgtcacaccttcatttcgtgggactacttctctaatctatacccatcctggtgaaaaataaagggagcgagttacttacttaattaaacatacttaagtttctctctgactctctctcctctttttaattaatttatcataaacaaatatgtgtgcgagtattaaacccgtgcaaaatattagtattattgtttaattttttttccttctcatcaatcataaatatactttttaatacaaaataaaaaatagttaactcagaagatttcttcacttaatcacttcgattcaatattaaaaatcaatccacgctttgttgttttttttcccatgacttatcacgtacatttattatttattatttttctgatgttcttactataaagggaatcactatttgtcacacacaaaactataaagggaatcaaatgatcaattcttatttaaaaactctattaattaaaattacaattacaacaaaaccctaattttatcctccttataattaaacctccacattctctctctctctatcaatacatgtgtttctcaaattaaatattttccatatcctccttttatcatgcaaagtcctcttccattctatatatagcccctacctcctccacctcctttccccactacaacacacaccaacaatcaaatcaatccatccaacctagacatctctcatcttctccaaattaacaaaaatggtagctgggaaatacccttcccccacatacttcatcctcctgctcataaccataacacgtttgatctccacagtgggcaagacctcccaatgctaacgccgcctccggaactcgcctcggtctccctcgatgacaccatcttcagcaagctccgcaacgacccagaggccctccaggggagggcctccagggactacgggaacctcgtccgcgaggttccctcggcggtcttccacccgacctcgtcgagcgacatcgcgaggctgatcaagctgtcgtacaacggttctgtccccttcaagatagcggcgagggggcaagggcactcgacgaggggccaggcgatggtacgtgatggggtggtggtggacatggccgggttcagagagagagggaatggagagggaataagggttgtgatgagtgttgttgtggaccctaataataagaatggttatggttactattatgctgatgttggaggggaacagttgtggatcgatgtgctaaacgccacgcttgagcatggacttgcacctatgtcctggactgattacttgtacttgacggtgggaggaactctctccaatgctggcatcagtggccagacattccgctatggtcctcaaatcaccactgtccgccaaatggacgtcatcactggtaagacaactttcaatttattcagttaattttatcatataattttaccaaatacttataaaccatatcagaaacttttaatttaatcaactaactcacaattagtttaatcatatacttttaatttaatccactaacttataaatttgtaacttttcagcttggaggtttgtaggttataagtctcaactttccactaacttataagttagttttagttttattgtatgtggtacttttgaaaattcaaggattttggtactataataactcgttcaactgttggcttagtatcaaaactcttggattttcaagtgtacttcaacaaccatcttaatttaattgatcagggttttaatattgtgaaaattggtcattggacaacttggaaagtgacacagcttggaaaagaaggaaagagggagatgggaagggaaaagaaagaaaataacttttaaaattagttgcgtgaaaaaattaaggttgctgaattaaattatggttcaccacgactctaattgtggcaacccaacgtgccgtggttgtggatattttcagaactttattgcaacttcggttatagtggcgtttgttcaattcattttttaatgtatcagactgtgattgcgattgaaattttataaaatctttttttttttaaacttgttcttttgattaggattaggaatttcagaaacttgattctatttcatatacttttttttaatgtaataccgaattagtggttgataaacgagtctttgtctacaaatttggtgaatgttagcaaccgctttccatctggtcccatgcttgaaaattttcttaaccatggaaattagttcacacggacagtcatagccttcaattcttgattaattgtttccttttctaaaatatggtgatactattatattattggtccaaggtcttgttttggtcaaatttttttattagaaataaacgggctgctgaattttaatttactcaagtgtttcttaaagaatatgtatgcatgcatgcaattatatattattattattatcattactgttatgtttaatcaagtttaatttggtttggttcaggaaagggagaatttgtgacttgctctcagcagacgaattcggagttgttccacgcggttctgggggcttaggacaatttggaattataacaagggcaagaatcgctcttgccccagctcccaagagggtacgtttaaaatcttcaagaattgactaggactttgtcttgttgcttcttcctccaacatctctcacatagtaacgccaatttctgcatatgttacattattaattcaaccatcaagctttagggaagcatcaaatgtccttgtcctaaatgctttatgtcatcatttttcttggcaccctttcgtttcacattgtgttagtgcatattagtcatccatgaaagacacatgaaaataaaatttgttggaaaaatataaatcatattttcataagtcttttgaaatatacagtaaccttagagaccttaagcaattaagccaataaaaagggtcgtattatcaaaccccaactaacaactattagaaaatactaacaagtataggtgcatacataaatatgtttccactagaaagtatataaagttggtgagatgattcattttgaattttagtaccttaattatttaactttatccttctatttgatgggactcatcgcataagccatacatatatacataatcatgcgttcattattgtttttcattatgagttaatgagttgattgtatgaactaatggtgaatttctcattggcaggttaaatgggtgagacttttgtacaatgacttttctgctttcaccaaagaccaggaacaactaatctcaatcactagaaggaaacaaaatattgcactggattatttggaaggattgctgctaatgcaccaaggacccataaataattggagatcttctttcttccctttagccgaccatgcccgaataatttcgctagtaactaaacacagcgtcctctattgcctagaagttgccaaatattatgatggccaaaatgaaaacaatgtggacaaggtaccgtctccattcatgtgcatttgccttcatgatgtgtcttttatttcttttcttttaattttttgtctcaccttatataataaccctttgtcacactcaatattattatatttttaaagagtttaatggttatacactatttttactttatttaattataaattatcattgatatattttttaagataattatcataaaagttaataaatttatcagttataattgaatgattgtataaaattatttaatttatattgcataatttattttctatttgtaatctttttttactataagttgttatattgtaagtaattaatattctcattttcatgattgtgtaggaactcaaagttttactacaaggactgagctatatccctggattttactatgaaaaagatgtctcgtatgttgagttcttgaatagagttcgaagtggagagttgaagctacaatcacaaggactatgggatgttcctcacccatggcttaatttgtttataccgaaatctcaaatcatggaatttgactcgggcgtgttcaagaatatcatccttaaacgaaacattaccacaggacccgtcttggtttaccccatgaatagaaacaagtaattgagcttaactaactaatctcaatttgtattgttatcattaggaaaaatgttaattggtacgaaaactatatactacactattttcattaaaattcatgaaagtgaaatttctctttcctaaaataacttctttctcttaaaatgaatttttgtttttctcaatctccatcaattacttatttccttttttgaacgtttgaaaagtcattcataacttttttttcataaaaaggtcatttcgtaccaattaaatagcattgcctttattatcatatgtacacaattcttctcttcactcacttctctctttttttttcccattaaaattgtaaaacaaataatcaggtgggacaataggatgtcagcatcaatacccgacgaggatatcttctacacagttggatttttgcattcaagtgggtttgataattggaaggcctatgatgctcaaaataaagaaattctacaattttgtaacgattctgggatcaaggttaagcaatatcttccccactaccgcacacaagaagattggacaaaccattttggccctaaatggaggacttttgtagaaagaaaacaccagtttgatccaaaaatgattctatcacctggacaaagaatctttaacaattaaactagctttaaaaaatatatataatatggtgggactacccaagttagctagctggctgatctcaagtgtacacataggacccagaattcagatgatagcctttgtacttgtttttgttaagagggtggggttaaaagctgcatgactttggcatatatgtagatcaggttacacatactttagatacgttaggttgacaaaatcatgtgtgaaagatgcacacagctagctgtgtacctttctttctctctctctctttctttctctctgtccctcaatttgtctatcactaaaaagattactatagtttagaacctagtgaagatggaaaaaaatcattatatagaggatttaattttatcacacgttctaatcatatacattaatattcttaaatgtgcaatgagtgtgttcggtgccttaatgattctttatctttgttaattgttagtatattatagggttttgtttttcccttcctaattttgtaacggccatccctactagcaataattgagatcctaggttaactaaggaagagcattattgtgtccaaattgagagtcctagctgtatgccataataataaatcatcgtaagttgctagatagatgtgataacgccaaatgccttcaaatactattattaatctccatcgcgagatccttcgttgtgattatgtagaaaagattacgctgcttttacaagagaatactccaagaaagcaagtgattgctccttaatataagaatcatacaataaacaaatggtgttgtagtccataaagtgtatttaatatttgatgaaagagtgtgtagacatcaaagtgataaaactaataaatttaagtttgatgcaattcgaagtcgtagatacttaattaatctctaaatcatattagttttaaaccatacagattttaatatgttgaatggattaatctttaattgtgcattggaaaatattataattcataaaaaaagaaataaagtttagacatgaataattacggactaatgaatgcaacctatatatactacgtctctcaattttgcggagaatttaggaatattatagtatttcactgaaaggacacacaagtggcaatgatgaatattttaattt

SEQ ID NO: 275 - DNA, 9716 bp, Artificial Sequence
  Synthetic polynucleotide
ttaaaaatatttaaagacttaattaaaaattattaaatatttcagagatctataaattaatttaacataaatgaaagtgttatcaaatatgtctagctaattgaaaaaaaaaaacttaaataaaaatttctttttacctgtcttattaggtgactaaggatataattgataaacaaaagtaattaattaattataagatctttaactttataaaaaataaataaaaaaatcttttaaaaaaaattcgacaattaaaaagaaattaacagagggagtaacaattttttacattaaaaaataaatttaaaatttgagtttaacggtcgtattatcatttagtgataaattatcgatataaattttaagataattattataaaaattaataaatttattatgataatttataattaaatcaaaatataaaattatttaacaccacgtgcataataatctaattcacaaaaaaaagaggtaatttatatagtctcttttattaccttatttttctgagtagtaataaatagacaccaagtgttaataataaagtttatcctttctcctcctatccgtctctttatttatttttcattacaaactttatcaaatctatcaatttctctctcttctatctttctctttgttctatccatacaacttaaaaatgtggttgtagtctaaaattttgcctctaattactgtctaccgcggtgtacttgacctgtacaattacctttcagatgctattataactagagaaatttagctcaagacttaaaaacaatggaccaagagatgtgctgtttccacaatgaggcacgtgtctcctcggtccagtcacgtgaagatccacgtgcctttactctgagcttgagccttagtagtttttcgtggttctctccctgtcctataaatttgagagcctgtatcttacatcctagacacacagtagtgactagctcattcattacaattcatcaccccagccaccaacccttttttcatgccaaaccacgaatttgcttctaattttcatgccaaaccctttcttctttcttttgagagagacgcaatccgctcctctatcttactggctagatcaattcctttctattaatttgcttctttctcaatttgtacatgccttcgatcttatagacatacatatatctcctaaactgcacatagagatttaaaaaaaaagaacaagttacaagtagaatttttttggcaagaatcgaagaaagtgagtgagagaaaagaatcttcatctttctgcatgttgcgtacagaatctttaaagccaaatcctgctcacgttaacccacgacgctgttccaagattttgttctcttctctggagcttcccaacattcttcctttccctcatccaccacccccactacccaataactcatcatcatcgtacgccacacacatgacatgcatgtatcttcattaattccttagcgaaaccacacgtactctagcttgtggggtagtttttaattattagttattcttatcttgttcaattcatggctgtcaacattgttctgttaacattcgccatatgccgtttaatagtaactgtgggattaacggtggtcccggagctgctcgatgtgggactccagggtcgtctcagcgtggacacgttggaactggaggcggcttcggtggatttcgggaggctgagtcgaggggagccttcggaggtagtgcaccctgccacggcggaggatgtggctagggtggtgaaggcggcgttcgagtctccgttcgccgtgtcagcgagggggcacgggcattcgataaacgggcaagccatgataaaagagaagaaaggagtggtgattgaaatgggaaaaagtgatagtggtgaggatggtagtagtattagagtgagtgagaaaggaatgtatgtggacgtgtggggtgggaagttgtggatagatgttttgagtgcaacattggagtatgggctggctcccatgtcttggaccgattacttgtatttgtctgtgggtggaaccctatccaacgctggaattagtggacaaaccttcaatcacggtcctcagatcaccaatgtttatgagctcgatgtcgttacaggtaatttaatatataatataatttgcattcacttttaactaatcacaaatatcattattggtatacttttttaaggtacaatttttgcattcacggttaatttttacaataatagtactatgtttaacatttgacaccttcaaagagaaaaaaaggagttctaccattataaatgattctaaagatggatttatattttcgaaaattaatgtttattatatacatttttaaataatttaaatttgttggtgttattgttgccaaatttgattgttttaccgtaagaaatgatgcttgtgcatgctaataactagttgttcttgttccccaagaggaaaagttaattttcactaattaaacagaggtgtcccactggtttgtcatggtgctgagtacaaacgaatctcgtttatctttagcgtggttaatctcgttgatatcataatgtgtactggtgtgtaacaggaaagggtgagctggtgacatgttcagaagatcgtaactcggagttgttccatgctgttctaggtggtcttggacaatttggaatcatcacaagggctagaattgctctcgaaccagctcctcacagagtgtgtatctctcccacgtactttatctttctttgtctctttttcttactcacacatatacagtacccaattccctctttcctaattgtatgactctcttttcgtactagctcgtgacctcgcacataatatgctaacatttcatgtaataattgaagataaagttataaaaatgaataatattatctgttttcataatgcatacatatacttcatttttattttttagaaacaactcaatgtaaataaaatttaaagtgtaaatattatttctttttttccatcatggaaaaaaaaagtcggttgaacatgatttccatgagatgataggaggggcacacacgatgcgtcttttcttggaaatctttcttcacatcagcgacaaaacctaaaaaaagggtcgttttcgaagggatggtttgggtactcttctaacaatataaagctggaataattatcgtttgcgtgtcgcctgcctgggacattctctgttttaattcatttctcttaacgaactaatatcactatcgattaagggaactgatatcaatgagctataacaatagaatattctcgtctaattaatattattagggtttaatttctatttactgtaaattaatattactataagaaattttacattttcaatcaatcatacatcatcgtggtggtataacttttaaagtgataattactataaaaaggaacatatacttctcatacatgtttatttataattgagagattagataaaatttgtttacacgttcaatagatatattattttctccaataaaattatattagagttagatatatgataaatatttaagtgcaggttcggtggatacgagtactgtattcgaattttgcaaggttttgtaaggaccaggagtatctgatatctctgcatgggaaagcagcaagggagagattcgactatgtggagggtttcgtgatagttgatgaagggctgatcaataattggaggtcttcgttcttttcagctagtaacccagttaaaatcacttccctcaacgctgacggaggtgttttgtactgcttggagattaccaaaaattacgaccaaggaaacgcagattctgttgatgaggtacgtacacacccaatcccacgtacattttctcttctttgtcagtgccttcacttatatataatattattgactgttcatacacttagtgcgctgtcacaataaaatatattcatttaactttcattagtttaattatgtgaagttaccttatttcgtttactaataacgtgttcatatcttatttattgcgtactccacttcgtgtacacattataattgtcattttttatcattttacaccaagaaaataataaataaataagactaataataattttataaaattaatattttattattattaattcatttataaattttgttatttataattaatatgataagcgatataattaaaaaataataattaatgttacatttaaaaattaaaatgataattattttgaaatatttttttctcttgtatgacagttactttaatgttgaagaaaatttagatagaattaaacaaaatgattggacaaaataattaatatattaaagttaaaattaaattatttcagtattatttaagtttgatatttaataaaaataattttttattcgattttacttattttttgattgaattctagattagttgagattcaatttttttaatgagttggagggataggaaaaaaatagttagatagaattaattcttgaaagagtgaaaaaaaaatacattgaagcttttttttattgaaacgtgtaagaatcgagattctaacaaaaaataaaacagggcttaagtagttaagtttttaccaaaatcactccacctagctagctaatgttgcctgtttaatttactttatgtatttttatttttttttcggttacatccatttgtttaaaataattgtttctcaaatatgctacttgatgtccatgttgttcaaattctaaactctagaaaagacatgaaatataagtatgtgtcagaataattaattaagtcttcgggctttttcgtccagtttttgttagttggtcaacacatttatgcttcagagattctataggatttatagggagcaaaatataaaattaacaggcaaacataaaaggacaaaattaatggcgttgatttgaacatcaattaaaaagtaacattgatattcataacaaattaacagacaaatgtgaaagaacaaaaatagcattattcaataccagttgtttttaccacattaaatttgaacgtttagttttgagtcatctgtcctttctctctttatcgttctacccttgagaagatcaacggaagaaatatgtcaattattctgacgaatactctcatatgattatgcgattaatgtcaagattttcttcgttcacaaattcatgcttactttaataattcagtatctgtctgttttatgtttgaagtctgatttaatattgttaatggtatctttaagtaattggtcaaacaattcaattaacaagaaaaatgatatacgctgtccagaggtaatcacattttatttaatttcataatttattgaattaaaaccttggttcttccttcatcgctgtcctcgtatatgattattctctgtacccaaacattgaccagtctctagttgtagaacagaatgcaataaaacatacaaaagaaaacatgtggaagatcttgtgcaatctatcatctcgattcaatcgcaagattgaatgcaacctttacaatagttaattttcactgtttaaaaatgccggcagtccaccagaatattctctcacttgtttttaacttctcttaattaattcttgtcaaagctatatataactgctcacaatagtgggtctcatatcccgacaaaagcaccggctaccttagctagcagctttcctttttcatgcataactatttaatttaagacctagagaggaaaaaagagataaatatagtttaaataagtgatatgatgttatagaaaaataaacataaaatatgttactagagtatttcatttatatatatatatatatactccacttttataaatatatttaaataaatagttatttgtattttgatctactagaatgacgtatgagagatttttttttaatctttaatttttgttattaagtacttatgtttttaaagttaaacaaagttagtctttctattaatattctttacaaaacgtcaaaacctttaagttcattttctgtttaaaatatttataaattatatctattacattatttaaatactttttattcgaagcataccaaccgaaattaaacatcaaaagacattttcttagatttctctttgtacgtttttatggtatgcaggaaatacaagctctattgaaaaagttaaattttataccaacatcggttttcacaacggacttgccttacgtggattttctggatcgtgtacataaggcagagctgaagcttagatccaagggtttatgggatgtacctcatccgtggctcaacctttttgttccaaaatcaaggataggggacttcgacaagggtgtgttcaagggcattcttggaaataagacaagtggacctatcctcatataccctatgaacaaaaacaagtaagtttataaatatatatttccgcatgcatatccatttgttatactatcatattcatccatgtcctagtcatatatatgtagaataaaaccactgcatgtttgcaggcatgcacatatctcctcatatataaaccacatgtctgctgctgatagcctcatatcgactgtcagtgtttagggaagaagaaaagaaaagaaaaagttcaaatgagtaatgaaatagagtatgaagttttgtgatcatatatgaaagagaaaaacctgcaacataatatatattttctacaacgaatattcccaataattatggaactagatgaaaatgtgtgaagattctccacgattgatggacagatagtactattgtcggaattaatggattagggaataaacagaatctagacgtttacattaatcctaataatagatggctgaatctgtttgtttctactttcattgtgtgtattaattaatccaggtcctcgataattcttgaattaaagaagattctgtttgataaatttgtctacacttaattaaacactgacaaaaaaaactaaaatgaattaatttatttttataaattaaaatttacatctcaataaaatattagctatagataacttaaattaagaatgcttaatccaattaagtgaaaataaaaaatatgaaaagaacaagaagcacagtgaggtgcatgtagtggaaagacatggaagacacacgagggttgtattgtagccaacatagcagatgaaaatctgcatcaaagccagctaggaagtgccacgtttattatttcttgaccagaagcaaacaaaatggatggccatgatcatccaactggagagattctggtgtcagaagatcttccatagggacccactcctcgaatggtagggatgtctcctctccactcctcaccttttatactaacctagttccatagacaccgccatatgcatcaacttccaggtcaatatcaatataatatgcacaaataaacaaataaaaaccataataattgcacttagttatgttttttttttttcattttaaaaataccaaaaattaatgataatgatatcacaaataaaaataaaaatgcatgtttgttagagggtatataatataagaaagacaacgcttgtccaaagcatttatatatagagagagagaataagataaaaaattaaatgaattctatgtatcttgccataggtttctgactgataagtcgatggattattaatgtttttgaattagaccacgaattagaaatacttaaaaaagttctattgttatttcaacagagtagtagtaagtaaagtaaatggtttcaagtgtgcagtatagatgaatagaaaaattcaaaagatgattttgggcgatggtgatgtgtaggtgggaccagcgaagctcggtggtgacaccagaagaggatgtgttttacctggtggcatttctaagatcggcattggatactgagacgctggagtacctgactaatcagaaccgtcaaattctgaaattctgccatgatatagagatcaaggtaaaacaatacctgccccattacactacgcagcaggagtggatggaccactttggtgataagtggacccagttcaatgctaggaagatgcaattcgatccccgccgaatcttagccacaggccagcaaatttttcagtttcatccctcactcaccctcaatatgtagaacaaacatgcaaaatggataaataatcttgggttcatgttgagtagcaagtgctgtattattgtaattaggaaatacaaggaggatcatggcaaaaaaagaattagaaggatgtagttgtagtgcactagtgaaggatcaagagttgttgaggtgttgttatctgagggtaataaaattgatgatggagttggatttttgttatgtaatggggtcttgtagcaaattaagtaaggaacccaataaggattaggcccaaagaatataaggagtggtggggcccgctttggaggaggaaaagggcaatgcgcaagtgcacatgagcaccgcccgtctggtttggctgtctcgtttttcaatatagatatcttttattacccatccaaattcctcgtacatataattcttctagatgtattagtctgtatgtttatttcaaatggaaacatttaatcagtgactccttataaaacataatcaacggcatttatgaataaagttaataagttaagagggaaaggaaagaggagaggaaaatgttcaaatgaatcaaatttctcccattaacatttttaataaaattaatatttatcgataaaaaaaatatcaacaagttaagaaaataataataatagacatgtattgctaatataaaagtttccgtacacaattaattaattagaaactatcttaaatatcacttttaacaaagtaataatataaatcaataacataactttttttttatcactataatattaatgtgacatatttgtctattttgagaggttggaaacttggagacgagctctagaaacacatgactttcgcctaaacagaagcaaatcggagtatatggaatgtaagttcaacaaaagtaagagggtatctaactcagatgtgaaaatagaagaccatattatccctcaagtcacacagtttaaatatcttgggtctgtaatacaggatgatggagaaattgaaggggatgtgaatcatcgcattcaagcaggatggatgaaatggagaaaagcatcaggggtgttatgtgatgcaaaggtaccgatcaagctaaagggaaagttttatcggactgcggtaagaccggcgattttgtacggaacagaatgttgggcggtcaagagccaacatgagactaaagtaggtgtagcggagatgaggatgttgcggtggatgtgtggtaagactcgacaggataaaattagaaacggagctattagagagagggttggagtagcgcctattgtagagaagatggtggaaaatagacttaggtgatttgggcatgtagagagaagaccggtagactctgtagtgaggagagtagaccagatggagagaaggcaaacaattcgagacagaggaagacccaaaaaaactataagagaagttatcaagaaggatttcgaacttaatgatttggatagaagtatggtacttgatagaacattatggcagaagttgatccatgtagccgaccccacctagtgggataaggtgttgttgttgttgttgtatttgtctattttattaatgattaatttctgttggagaacttaatt

SEQ ID NO: 276 - DNA, 5754 bp, Artificial Sequence
  Synthetic polynucleotide
ataaatggtagaaatctgtgggttcaaatgttcaattgctggggatcttcgtgatcatgatgattcatacacaatctctagaaacacgtacgcaaatattaattaatcaatttcctttttatagtctcctcacaattcacatgaaacttcatactctattatccgattccatttccatcgtatctttgaatttgacatttgtttgcccaacatgtaattaactttcccttctcatcttaaagatgtaacatgatatatattataacttgtaattaacccaatatttttaactctctatttttacactcatctgacatgtatttttatttttcatttttttttcttatcacatcacctcttacgtgtacaatttttctctttttcttatttctgtcttccataatagtaattaatattcatcggtccgatatgtatacagcccaaaaaagtgtgtaaaatcatttttgtatttctaaccctctctttctcatgcaagctagcttcttctttctatttatagcccttctcccttcacccaccaacacaccacaactccaaactttttcctcttgttctcttcttcttcaacacaactagtcataatccagctcatctctctctccctctctctttgttctctctttctctttctccaaaatggctctaaactacccttttttaacctacttcatactactgctgtttgatattcactgtgggaaaaactgagcaatggaaagctccgattctaccagagcttgacattgataacatatcccacaaactccatgatgaccctgaaaccattcaaatggcttcaagggactatggccatttaacgcatgaattcccattagctgtgtttcgtccatcttctatagatgacatagtcaccttgataaaatcttcgtacaatagctttgccccttttgacatagctgcgaggggccaaggccactccactcatggacaagccatggctcgtgatgggattgtggtggacatggccagcctaagaaaacaaagaaatggggttgcgattagtgtctctaaggaccctttgatgggtcactatgctgatgttggaggggaacaactctggattgatgtgctacatgccacacttgaatatggacttgcaccagtttcttggactgattatttgtacttgaccgtgggagggacactttctaatgctggaatcagtggccagagcttccgttatggacctcaaatcagcaacgttcatgaaatggatgtcatcactggtatggagttagttgttttttttaatcaataaatgttaatattattagcttgttagttttttttgaaaaaattgaattaactttcgtttcctcttttctttctttttttaaccacacaattaatctaataactactggtattaagttagtttattttccatttttcatatataagttaggatttctaattaaaattgacatttcgtaccaccactacaaaaaaataatgtatcagtggcacaaaaaaatatattggcatcacttgtttttttagtcattaatattttgtagcatcacaaaaaatatggtgacaagttttctaaaaattacaaattaactgattcgtcagtgatgttaatgattttttagtgcgtcttggcaactaatgttttcatcttatataaaattagaaacaatagcggcaacagcacctgacattgtgtttgtgttttgcgtgtttctatcgcctaatttttgttgagaacgtgttcgtgaaacttggaaaaagagaaaattgaaattttcttgagatatctaccacttaagaaaaacaaatggctgtttccgttttgtctcttatgacatgacatggtacgtcatagatgaagttctgctaaatatatttgatatgatttcttgaacacgttttatatattcccacttcccagttagtgtggttgttgaatctaattaaaacaggaatagtctttgtctacaatatgggtgagcgatgcaaactttccaagggtttagaagttagaactatataggtccacggtcataattttatattcttgattaactttatgttggttaagtcgttcatatttggtcaattcattcatatgagaaaatactgaaatacaaacatggaaaaatgttaattactcttataattggcgcatgcatgcatctaaattatatgattttaataaatagtttttgtcatctacttgatttcaggaaaaggagagttcgtaacatgctcttcacagaagaacttggagttattccacgcggttcttggaggcttgggacaatttggagttatagcaagggcgagaattgctcttgagccagcacccaaaagggtacgtttatagagaattgactagaattttgtcttgtagcttttcctccaccaattcatatagtgacacctaatcgaattgtcatttttttttacggtgaattgtcattttgtaaatctaccaagtggtagttggcacccatatatgtatgaactatagtaccatacatttcattttatgttggtgtgttagtcatccatgatgaacacatacacaaatgaaaataggacgagttatacgtacgtaagggtttgaatcactgaatgtggatttttgaagttgaaagcatattaatcttggtttgaaaaagaaaaaaaaaatcggaagtccctcttgaagttatcatgactcttatattaagccaatagaattagaaaaactataattatgaatgatcatgttaattctttcagtgacttaaaatcttatctacaaaaagtacccttttgaaaaagaccttcacttaagtccatgcatacagtactaatcttacatacttgagagttgagacttgaagcatgaggagatttgaagtctggagaaacaagccaccacatattaattactaccgtattcttatctttatttatccttccaattttgatgggactggttgcacatacattcatacatactaacatacataaatacgtctctctctcatgtatttcattttattatattctatttcgttagtaagtttactagtataagacattattaatggtgaatttttgttggcatgcaggttaagtgggtcagactactttatagtgacttttctgcttttaccaaagaccaggaacgattaatctcaatcaatggaaggaaacaaaagaacgcattggattttctggaagggatgctgctaatgaaccaaggccccataaataattggagatcctctttcttccctctatctgaccatcccagaatagcttctttaataactgaacatagcatcctctactgtcttgaagtggctaaatattatgacgaacaaaccgagttaaatgtggacaaggtaacctcgtctagtcatatctattatatatagttagatcttgtcacatttctttgtttaaaaaataaaataaaaggcacaatcccaaaaagtcaaaagcaaatgcctagatattgtgtgttttcttggatattaattattacaccttaataacccataataatttttttatttttctttgtctctgtaggaaattgaagttttgctccaaggactagcctatatccctggatttaattatgagaaaaatgtctcgtacgttgagttcttgaatagggtccgaagtggagagttgaaacttcagtcacaaggactgtgggaagttcctcacccgtggcttaatttgtttataccaaaatctcaaatcttggattttaattcaggagtattcaaagatatagttcttaaaagaaacatctcctctggaccagtcttggtttatcccatgaatagaaacaagtaagccttgaatgcatgaatcacaatctagtgtcattataattcaggagtgtgtgatgcaatcttttaattttctgaccattcaactcaatatcaattttatttcttttttcaattaaaatgcaaaagagaataataattaataatatgaaatttaattccaggtgggacgataggatgtcagcatctataccagacgaggatgttttctacacagttgggtttttgcactcaagtgggtttgatacttggaaggcatatgatgctcaaaacagagaaattttggagttctgtagagatgctggcatcatggtcaagcaatatcttcccaaccacagcacacaagaagattggacaaaccattttggtgctaaatggatgaaattcttagaaagaaaacatcagtttgatccaagaatgattctatcacctgggcaaaaaatcttccacaaaaaattacagccagtgttttaaatattttccctaataaaaaaagtaaaaatgttttgtggtgggactacctcaattagatggctagctagggacaggtgtacatacagtgtgaccaagaccaagatggcttttgtatgctaaagtttgcattgctagctagagaaattaataaggtggggcattaaaggctgcatgagtacttttggcacctattatgctacatattaccttagatacgttaggttgacaaagtcgtactggtaggtacaagaagcacagttgtctctcacactgtctgtcacccaacttgctatatagtgtgtggagaaattcggatcatattgaagatgctgtgagttatagtcctccaatattaaatgtttaacgattctgtctttctcttatataattttgttttgcattatattactttcgcactggtgcaaacatatatatcaatgattataattaatttatacaatgacgagtataattgtacccaagttgcatgccataatatttgtcaaaaacaaaaagttgtatgccataatcaatccaggttgctagataataagatagatatgaatatgataacataaaatgctattaaagcaacaaataaacaataacacatagtccttatagggttcataattgatcgatgaacctagctagacgttgattttaggttaatttccagcgaggataaaatttattatataaagaaataactaaccaacacaaaataataaaaaattaaaaaaaaacgaagaaacttattttagagatataatttgttttagtatttgattgtaatttgagagattagctaggctctcaccaagtgagatctagagtatattcttaagaaaatatttataataaagaacccttaaacattttgcaaaacaaagggtggaattaatattaacaacaataattataatatcttgaaaattttatgaaaataatatatatatatatatatatatagagagagagagagagagagagagaaaattctcacaaacaatttttatctgttatttcaaattggtgtatgactccttagtccttagttcatttgtttgcacccagtcctgtcttaggtagttgattttatagttaggtaaattaatttctcgcactcttcgcttgattgtcatttatgggttgaactgttgaagtgattttatattttttaataaatttcacctgcaaaaaaactcaccattagcatacgccccccccccccccccccccccctctcccaaaaaaaaaaaaaaaacgaaagaagattaattagaaagaataaggtcgtgaaatgatgttacaaataaggcatatcagaatcagacgcaagggaagaataaaaacgttacaacaattcgcgcacaatgcaccccaaaaaaaaaatgacaggcacacataccttaaggaagaagaatcaacgctttca

SEQ ID NO: 277 - DNA, 5747 bp, Artificial Sequence
  Synthetic polynucleotide
ataaatggtagaaatctgtgggttcaaatgttcaattgctggggatcttcgtgatcatgatgattcatacacaatctctagaaacacgtacgcaaatattaattaatcaatttcctttttatagtctcctcacaattcacatgaaacttcatactctattatccgattccatttccatcgtatctttgaatttgacatttgtttgcccaacatgtaattaactttcccttctcatcttaaagatgtaacatgatatatattataacttgtaattaacccaatatttttaactctctatttttacactcatctgacatgtatttttatttttcatttttttttcttatcacatcacctcttacgtgtacaatttttctctttttcttatttctgtcttccataatagtaattaatattcatcggtccgatatgtatacagcccaaaaaagtgtgtaaaatcatttttgtatttctaaccctctctttctcatgcaagctagcttcttctttctatttatagcccttctcccttcacccaccaacacaccacaactccaaactttttcctcttgttctcttcttcttcaacacaactagtcataatccagctcatctctctctccctctctctttgttctctctttctctttctccaaaatggctctaaactacccttttttaacctacttcatactactgctattcactgtgggaaaaactgagcaatggaaagctccgattctaccagagcttgacattgataacatatcccacaaactccatgatgaccctgaaaccattcaaatggcttcaagggactatggccatttaacgcatgaattcccattagctgtgtttcgtccatcttctatagatgacatagtcaccttgataaaatcttcgtacaatagctttgccccttttgacatagctgcgaggggccaaggccactccactcatggacaagccatggctcgtgatgggattgtggtggacatggccagcctaagaaaacaaagaaatggggttgcgattagtgtctctaaggaccctttgatgggtcactatgctgatgttggaggggaacaactctggattgatgtgctacatgccacacttgaatatggacttgcaccagtttcttggactgattatttgtacttgaccgtgggagggacactttctaatgctggaatcagtggccagagcttccgttatggacctcaaatcagcaacgttcatgaaatggatgtcatcactggtatggagttagttgttttttttaatcaataaatgttaatattattagcttgttagttttttttgaaaaaattgaattaactttcgtttcctcttttctttctttttttaaccacacaattaatctaataactactggtattaagttagtttattttccatttttcatatataagttaggatttctaattaaaattgacatttcgtaccaccactacaaaaaaataatgtatcagtggcacaaaaaaatatattggcatcacttgtttttttagtcattaatattttgtagcatcacaaaaaatatggtgacaagttttctaaaaattacaaattaactgattcgtcagtgatgttaatgattttttagtgcgtcttggcaactaatgttttcatcttatataaaattagaaacaatagcggcaacagcacctgacattgtgtttgtgttttgcgtgtttctatcgcctaatttttgttgagaacgtgttcgtgaaacttggaaaaagagaaaattgaaattttcttgagatatctaccacttaagaaaaacaaatggctgtttccgttttgtctcttatgacatgacatggtacgtcatagatgaagttctgctaaatatatttgatatgatttcttgaacacgttttatatattcccacttcccagttagtgtggttgttgaatctaattaaaacaggaatagtctttgtctacaatatgggtgagcgatgcaaactttccaagggtttagaagttagaactatataggtccacggtcataattttatattcttgattaactttatgttggttaagtcgttcatatttggtcaattcattcatatgagaaaatactgaaatacaaacatggaaaaatgttaattactcttataattggcgcatgcatgcatctaaattatatgattttaataaatagtttttgtcatctacttgatttcaggaaaaggagagttcgtaacatgctcttcacagaagaacttggagttattccacgcggttcttggaggcttgggacaatttggagttatagcaagggcgagaattgctcttgagccagcacccaaaagggtacgtttatagagaattgactagaattttgtcttgtagcttttcctccaccaattcatatagtgacacctaatcgaattgtcatttttttttacggtgaattgtcattttgtaaatctaccaagtggtagttggcacccatatatgtatgaactatagtaccatacatttcattttatgttggtgtgttagtcatccatgatgaacacatacacaaatgaaaataggacgagttatacgtacgtaagggtttgaatcactgaatgtggatttttgaagttgaaagcatattaatcttggtttgaaaaagaaaaaaaaaatcggaagtccctcttgaagttatcatgactcttatattaagccaatagaattagaaaaactataattatgaatgatcatgttaattctttcagtgacttaaaatcttatctacaaaaagtacccttttgaaaaagaccttcacttaagtccatgcatacagtactaatcttacatacttgagagttgagacttgaagcatgaggagatttgaagtctggagaaacaagccaccacatattaattactaccgtattcttatctttatttatccttccaattttgatgggactggttgcacatacattcatacatactaacatacataaatacgtctctctctcatgtatttcattttattatattctatttcgttagtaagtttactagtataagacattattaatggtgaatttttgttggcatgcaggttaagtgggtcagactactttatagtgacttttctgcttttaccaaagaccaggaacgattaatctcaatcaatggaaggaaacaaaagaacgcattggattttctggaagggatgctgctaatgaaccaaggccccataaataattggagatcctctttcttccctctatctgaccatcccagaatagcttctttaataactgaacatagcatcctctactgtcttgaagtggctaaatattatgacgaacaaaccgagttaaatgtggacaaggtaacctcgtctagtcatatctattatatatagttagatcttgtcacatttctttgtttaaaaaataaaataaaaggcacaatcccaaaaagtcaaaagcaaatgcctagatattgtgtgttttcttggatattaattattacaccttaataacccataataatttttttatttttctttgtctctgtaggaaattgaagttttgctccaaggactagcctatatccctggatttaattatgagaaaaatgtctcgtacgttgagttcttgaatagggtccgaagtggagagttgaaacttcagtcacaaggactgtgggaagttcctcacccgtggcttaatttgtttataccaaaatctcaaatcttggattttaattcaggagtattcaaagatatagttcttaaaagaaacatctcctctggaccagtcttggtttatcccatgaatagaaacaagtaagccttgaatgcatgaatcacaatctagtgtcattataattcaggagtgtgtgatgcaatcttttaattttctgaccattcaactcaatatcaattttatttcttttttcaattaaaatgcaaaagagaataataattaataatatgaaatttaattccaggtgggacgataggatgtcagcatctataccagacgaggatgttttctacacagttgggtttttgcactcaagtgggtttgatacttggaaggcatatgatgctcaaaacagagaaattttggagttctgtagagatgctggcatcatggtcaagcaatatcttcccaaccacagcacacaagaagattggacaaaccattttggtgctaaatggatgaaattcttagaaagaaaacatcagtttgatccaagaatgattctatcacctgggcaaaaaatcttccacaaaaaattacagccagtgttttaaatattttccctaataaaaaaagtaaaaatgttttgtggtgggactacctcaattagatggctagctagggacaggtgtacatacagtgtgaccaagaccaagatggcttttgtatgctaaagtttgcattgctagctagagaaattaataaggtggggcattaaaggctgcatgagtacttttggcacctattatgctacatattaccttagatacgttaggttgacaaagtcgtactggtaggtacaagaagcacagttgtctctcacactgtctgtcacccaacttgctatatagtgtgtggagaaattcggatcatattgaagatgctgtgagttatagtcctccaatattaaatgtttaacgattctgtctttctcttatataattttgttttgcattatattactttcgcactggtgcaaacatatatatcaatgattataattaatttatacaatgacgagtataattgtacccaagttgcatgccataatatttgtcaaaaacaaaaagttgtatgccataatcaatccaggttgctagataataagatagatatgaatatgataacataaaatgctattaaagcaacaaataaacaataacacatagtccttatagggttcataattgatcgatgaacctagctagacgttgattttaggttaatttccagcgaggataaaatttattatataaagaaataactaaccaacacaaaataataaaaaattaaaaaaaaacgaagaaacttattttagagatataatttgttttagtatttgattgtaatttgagagattagctaggctctcaccaagtgagatctagagtatattcttaagaaaatatttataataaagaacccttaaacattttgcaaaacaaagggtggaattaatattaacaacaataattataatatcttgaaaattttatgaaaataatatatatatatatatatatatagagagagagagagagagagagagaaaattctcacaaacaatttttatctgttatttcaaattggtgtatgactccttagtccttagttcatttgtttgcacccagtcctgtcttaggtagttgattttatagttaggtaaattaatttctcgcactcttcgcttgattgtcatttatgggttgaactgttgaagtgattttatattttttaataaatttcacctgcaaaaaaactcaccattagcatacgccccccccccccccccccccccctctcccaaaaaaaaaaaaaaaacgaaagaagattaattagaaagaataaggtcgtgaaatgatgttacaaataaggcatatcagaatcagacgcaagggaagaataaaaacgttacaacaattcgcgcacaatgcaccccaaaaaaaaaatgacaggcacacataccttaaggaagaagaatcaacgctttca

SEQ ID NO: 278 - DNA, 5906 bp, Artificial Sequence
  Synthetic polynucleotide
atttagcatccctccctttgcacaatgtacaatttgggttttgaataatttttgtcacaccttcatttcgtgggactacttctctaatctatacccatcctggtgaaaaataaagggagcgagttacttacttaattaaacatacttaagtttctctctgactctctctcctctttttaattaatttatcataaacaaatatgtgtgcgagtattaaacccgtgcaaaatattagtattattgtttaattttttttccttctcatcaatcataaatatactttttaatacaaaataaaaaatagttaactcagaagatttcttcacttaatcacttcgattcaatattaaaaatcaatccacgctttgttgttttttttcccatgacttatcacgtacatttattatttattatttttctgatgttcttactataaagggaatcactatttgtcacacacaaaactataaagggaatcaaatgatcaattcttatttaaaaactctattaattaaaattacaattacaacaaaaccctaattttatcctccttataattaaacctccacattctctctctctctatcaatacatgtgtttctcaaattaaatattttccatatcctccttttatcatgcaaagtcctcttccattctatatatagcccctacctcctccacctcctttccccactacaacacacaccaacaatcaaatcaatccatccaacctagacatctctcatcttctccaaattaacaaaaatggtagctgggaaatacccttcccccacatacttcatcctcctgctcataaccataacacgtttgatctccacagtgggcaagacctcccaatctaacgccgcctccggaactcgcctcggtctccctcgatgacaccatcttcagcaagctccgcaacgacccagaggccctccaggggagggcctccagggactacgggaacctcgtccgcgaggttccctcggcggtcttccacccgacctcgtcgagcgacatcgcgaggctgatcaagctgtcgtacaacggttctgtccccttcaagatagcggcgagggggcaagggcactcgacgaggggccaggcgatggtacgtgatggggtggtggtggacatggccgggttcagagagagagggaatggagagggaataagggttgtgatgagtgttgttgtggaccctaataataagaatggttatggttactattatgctgatgttggaggggaacagttgtggatcgatgtgctaaacgccacgcttgagcatggacttgcacctatgtcctggactgattacttgtacttgacggtgggaggaactctctccaatgctggcatcagtggccagacattccgctatggtcctcaaatcaccactgtccgccaaatggacgtcatcactggtaagacaactttcaatttattcagttaattttatcatataattttaccaaatacttataaaccatatcagaaacttttaatttaatcaactaactcacaattagtttaatcatatacttttaatttaatccactaacttataaatttgtaacttttcagcttggaggtttgtaggttataagtctcaactttccactaacttataagttagttttagttttattgtatgtggtacttttgaaaattcaaggattttggtactataataactcgttcaactgttggcttagtatcaaaactcttggattttcaagtgtacttcaacaaccatcttaatttaattgatcagggttttaatattgtgaaaattggtcattggacaacttggaaagtgacacagcttggaaaagaaggaaagagggagatgggaagggaaaagaaagaaaataacttttaaaattagttgcgtgaaaaaattaaggttgctgaattaaattatggttcaccacgactctaattgtggcaacccaacgtgccgtggttgtggatattttcagaactttattgcaacttcggttatagtggcgtttgttcaattcattttttaatgtatcagactgtgattgcgattgaaattttataaaatctttttttttttaaacttgttcttttgattaggattaggaatttcagaaacttgattctatttcatatacttttttttaatgtaataccgaattagtggttgataaacgagtctttgtctacaaatttggtgaatgttagcaaccgctttccatctggtcccatgcttgaaaattttcttaaccatggaaattagttcacacggacagtcatagccttcaattcttgattaattgtttccttttctaaaatatggtgatactattatattattggtccaaggtcttgttttggtcaaatttttttattagaaataaacgggctgctgaattttaatttactcaagtgtttcttaaagaatatgtatgcatgcatgcaattatatattattattattatcattactgttatgtttaatcaagtttaatttggtttggttcaggaaagggagaatttgtgacttgctctcagcagacgaattcggagttgttccacgcggttctgggggcttaggacaatttggaattataacaagggcaagaatcgctcttgccccagctcccaagagggtacgtttaaaatcttcaagaattgactaggactttgtcttgttgcttcttcctccaacatctctcacatagtaacgccaatttctgcatatgttacattattaattcaaccatcaagctttagggaagcatcaaatgtccttgtcctaaatgctttatgtcatcatttttcttggcaccctttcgtttcacattgtgttagtgcatattagtcatccatgaaagacacatgaaaataaaatttgttggaaaaatataaatcatattttcataagtcttttgaaatatacagtaaccttagagaccttaagcaattaagccaataaaaagggtcgtattatcaaaccccaactaacaactattagaaaatactaacaagtataggtgcatacataaatatgtttccactagaaagtatataaagttggtgagatgattcattttgaattttagtaccttaattatttaactttatccttctatttgatgggactcatcgcataagccatacatatatacataatcatgcgttcattattgtttttcattatgagttaatgagttgattgtatgaactaatggtgaatttctcattggcaggttaaatgggtgagacttttgtacaatgacttttctgctttcaccaaagaccaggaacaactaatctcaatcactagaaggaaacaaaatattgcactggattatttggaaggattgctgctaatgcaccaaggacccataaataattggagatcttctttcttccctttagccgaccatgcccgaataatttcgctagtaactaaacacagcgtcctctattgcctagaagttgccaaatattatgatggccaaaatgaaaacaatgtggacaaggtaccgtctccattcatgtgcatttgccttcatgatgtgtcttttatttcttttcttttaattttttgtctcaccttatataataaccctttgtcacactcaatattattatatttttaaagagtttaatggttatacactatttttactttatttaattataaattatcattgatatattttttaagataattatcataaaagttaataaatttatcagttataattgaatgattgtataaaattatttaatttatattgcataatttattttctatttgtaatctttttttactataagttgttatattgtaagtaattaatattctcattttcatgattgtgtaggaactcaaagttttactacaaggactgagctatatccctggattttactatgaaaaagatgtctcgtatgttgagttcttgaatagagttcgaagtggagagttgaagctacaatcacaaggactatgggatgttcctcacccatggcttaatttgtttataccgaaatctcaaatcatggaatttgactcgggcgtgttcaagaatatcatccttaaacgaaacattaccacaggacccgtcttggtttaccccatgaatagaaacaagtaattgagcttaactaactaatctcaatttgtattgttatcattaggaaaaatgttaattggtacgaaaactatatactacactattttcattaaaattcatgaaagtgaaatttctctttcctaaaataacttctttctcttaaaatgaatttttgtttttctcaatctccatcaattacttatttccttttttgaacgtttgaaaagtcattcataacttttttttcataaaaaggtcatttcgtaccaattaaatagcattgcctttattatcatatgtacacaattcttctcttcactcacttctctctttttttttcccattaaaattgtaaaacaaataatcaggtgggacaataggatgtcagcatcaatacccgacgaggatatcttctacacagttggatttttgcattcaagtgggtttgataattggaaggcctatgatgctcaaaataaagaaattctacaattttgtaacgattctgggatcaaggttaagcaatatcttccccactaccgcacacaagaagattggacaaaccattttggccctaaatggaggacttttgtagaaagaaaacaccagtttgatccaaaaatgattctatcacctggacaaagaatctttaacaattaaactagctttaaaaaatatatataatatggtgggactacccaagttagctagctggctgatctcaagtgtacacataggacccagaattcagatgatagcctttgtacttgtttttgttaagagggtggggttaaaagctgcatgactttggcatatatgtagatcaggttacacatactttagatacgttaggttgacaaaatcatgtgtgaaagatgcacacagctagctgtgtacctttctttctctctctctctttctttctctctgtccctcaatttgtctatcactaaaaagattactatagtttagaacctagtgaagatggaaaaaaatcattatatagaggatttaattttatcacacgttctaatcatatacattaatattcttaaatgtgcaatgagtgtgttcggtgccttaatgattctttatctttgttaattgttagtatattatagggttttgtttttcccttcctaattttgtaacggccatccctactagcaataattgagatcctaggttaactaaggaagagcattattgtgtccaaattgagagtcctagctgtatgccataataataaatcatcgtaagttgctagatagatgtgataacgccaaatgccttcaaatactattattaatctccatcgcgagatccttcgttgtgattatgtagaaaagattacgctgcttttacaagagaatactccaagaaagcaagtgattgctccttaatataagaatcatacaataaacaaatggtgttgtagtccataaagtgtatttaatatttgatgaaagagtgtgtagacatcaaagtgataaaactaataaatttaagtttgatgcaattcgaagtcgtagatacttaattaatctctaaatcatattagttttaaaccatacagattttaatatgttgaatggattaatctttaattgtgcattggaaaatattataattcataaaaaaagaaataaagtttagacatgaataattacggactaatgaatgcaacctatatatactacgtctctcaattttgcggagaatttaggaatattatagtatttcactgaaaggacacacaagtggcaatgatgaatattttaattt

SEQ ID NO: 279 - DNA, 5900 bp, Artificial Sequence
  Synthetic polynucleotide
atttagcatccctccctttgcacaatgtacaatttgggttttgaataatttttgtcacaccttcatttcgtgggactacttctctaatctatacccatcctggtgaaaaataaagggagcgagttacttacttaattaaacatacttaagtttctctctgactctctctcctctttttaattaatttatcataaacaaatatgtgtgcgagtattaaacccgtgcaaaatattagtattattgtttaattttttttccttctcatcaatcataaatatactttttaatacaaaataaaaaatagttaactcagaagatttcttcacttaatcacttcgattcaatattaaaaatcaatccacgctttgttgttttttttcccatgacttatcacgtacatttattatttattatttttctgatgttcttactataaagggaatcactatttgtcacacacaaaactataaagggaatcaaatgatcaattcttatttaaaaactctattaattaaaattacaattacaacaaaaccctaattttatcctccttataattaaacctccacattctctctctctctatcaatacatgtgtttctcaaattaaatattttccatatcctccttttatcatgcaaagtcctcttccattctatatatagcccctacctcctccacctcctttccccactacaacacacaccaacaatcaaatcaatccatccaacctagacatctctcatcttctccaaattaacaaaaatggtagctgggaaatacccttcccccacatacttcatcctcctgctcataaccataacacgtttgatctccacagtgggcaaaggccctaacgccgcctccggaactcgcctcggtctccctcgatgacaccatcttcagcaagctccgcaacgacccagaggccctccaggggagggcctccagggactacgggaacctcgtccgcgaggttccctcggcggtcttccacccgacctcgtcgagcgacatcgcgaggctgatcaagctgtcgtacaacggttctgtccccttcaagatagcggcgagggggcaagggcactcgacgaggggccaggcgatggtacgtgatggggtggtggtggacatggccgggttcagagagagagggaatggagagggaataagggttgtgatgagtgttgttgtggaccctaataataagaatggttatggttactattatgctgatgttggaggggaacagttgtggatcgatgtgctaaacgccacgcttgagcatggacttgcacctatgtcctggactgattacttgtacttgacggtgggaggaactctctccaatgctggcatcagtggccagacattccgctatggtcctcaaatcaccactgtccgccaaatggacgtcatcactggtaagacaactttcaatttattcagttaattttatcatataattttaccaaatacttataaaccatatcagaaacttttaatttaatcaactaactcacaattagtttaatcatatacttttaatttaatccactaacttataaatttgtaacttttcagcttggaggtttgtaggttataagtctcaactttccactaacttataagttagttttagttttattgtatgtggtacttttgaaaattcaaggattttggtactataataactcgttcaactgttggcttagtatcaaaactcttggattttcaagtgtacttcaacaaccatcttaatttaattgatcagggttttaatattgtgaaaattggtcattggacaacttggaaagtgacacagcttggaaaagaaggaaagagggagatgggaagggaaaagaaagaaaataacttttaaaattagttgcgtgaaaaaattaaggttgctgaattaaattatggttcaccacgactctaattgtggcaacccaacgtgccgtggttgtggatattttcagaactttattgcaacttcggttatagtggcgtttgttcaattcattttttaatgtatcagactgtgattgcgattgaaattttataaaatctttttttttttaaacttgttcttttgattaggattaggaatttcagaaacttgattctatttcatatacttttttttaatgtaataccgaattagtggttgataaacgagtctttgtctacaaatttggtgaatgttagcaaccgctttccatctggtcccatgcttgaaaattttcttaaccatggaaattagttcacacggacagtcatagccttcaattcttgattaattgtttccttttctaaaatatggtgatactattatattattggtccaaggtcttgttttggtcaaatttttttattagaaataaacgggctgctgaattttaatttactcaagtgtttcttaaagaatatgtatgcatgcatgcaattatatattattattattatcattactgttatgtttaatcaagtttaatttggtttggttcaggaaagggagaatttgtgacttgctctcagcagacgaattcggagttgttccacgcggttctgggggcttaggacaatttggaattataacaagggcaagaatcgctcttgccccagctcccaagagggtacgtttaaaatcttcaagaattgactaggactttgtcttgttgcttcttcctccaacatctctcacatagtaacgccaatttctgcatatgttacattattaattcaaccatcaagctttagggaagcatcaaatgtccttgtcctaaatgctttatgtcatcatttttcttggcaccctttcgtttcacattgtgttagtgcatattagtcatccatgaaagacacatgaaaataaaatttgttggaaaaatataaatcatattttcataagtcttttgaaatatacagtaaccttagagaccttaagcaattaagccaataaaaagggtcgtattatcaaaccccaactaacaactattagaaaatactaacaagtataggtgcatacataaatatgtttccactagaaagtatataaagttggtgagatgattcattttgaattttagtaccttaattatttaactttatccttctatttgatgggactcatcgcataagccatacatatatacataatcatgcgttcattattgtttttcattatgagttaatgagttgattgtatgaactaatggtgaatttctcattggcaggttaaatgggtgagacttttgtacaatgacttttctgctttcaccaaagaccaggaacaactaatctcaatcactagaaggaaacaaaatattgcactggattatttggaaggattgctgctaatgcaccaaggacccataaataattggagatcttctttcttccctttagccgaccatgcccgaataatttcgctagtaactaaacacagcgtcctctattgcctagaagttgccaaatattatgatggccaaaatgaaaacaatgtggacaaggtaccgtctccattcatgtgcatttgccttcatgatgtgtcttttatttcttttcttttaattttttgtctcaccttatataataaccctttgtcacactcaatattattatatttttaaagagtttaatggttatacactatttttactttatttaattataaattatcattgatatattttttaagataattatcataaaagttaataaatttatcagttataattgaatgattgtataaaattatttaatttatattgcataatttattttctatttgtaatctttttttactataagttgttatattgtaagtaattaatattctcattttcatgattgtgtaggaactcaaagttttactacaaggactgagctatatccctggattttactatgaaaaagatgtctcgtatgttgagttcttgaatagagttcgaagtggagagttgaagctacaatcacaaggactatgggatgttcctcacccatggcttaatttgtttataccgaaatctcaaatcatggaatttgactcgggcgtgttcaagaatatcatccttaaacgaaacattaccacaggacccgtcttggtttaccccatgaatagaaacaagtaattgagcttaactaactaatctcaatttgtattgttatcattaggaaaaatgttaattggtacgaaaactatatactacactattttcattaaaattcatgaaagtgaaatttctctttcctaaaataacttctttctcttaaaatgaatttttgtttttctcaatctccatcaattacttatttccttttttgaacgtttgaaaagtcattcataacttttttttcataaaaaggtcatttcgtaccaattaaatagcattgcctttattatcatatgtacacaattcttctcttcactcacttctctctttttttttcccattaaaattgtaaaacaaataatcaggtgggacaataggatgtcagcatcaatacccgacgaggatatcttctacacagttggatttttgcattcaagtgggtttgataattggaaggcctatgatgctcaaaataaagaaattctacaattttgtaacgattctgggatcaaggttaagcaatatcttccccactaccgcacacaagaagattggacaaaccattttggccctaaatggaggacttttgtagaaagaaaacaccagtttgatccaaaaatgattctatcacctggacaaagaatctttaacaattaaactagctttaaaaaatatatataatatggtgggactacccaagttagctagctggctgatctcaagtgtacacataggacccagaattcagatgatagcctttgtacttgtttttgttaagagggtggggttaaaagctgcatgactttggcatatatgtagatcaggttacacatactttagatacgttaggttgacaaaatcatgtgtgaaagatgcacacagctagctgtgtacctttctttctctctctctctttctttctctctgtccctcaatttgtctatcactaaaaagattactatagtttagaacctagtgaagatggaaaaaaatcattatatagaggatttaattttatcacacgttctaatcatatacattaatattcttaaatgtgcaatgagtgtgttcggtgccttaatgattctttatctttgttaattgttagtatattatagggttttgtttttcccttcctaattttgtaacggccatccctactagcaataattgagatcctaggttaactaaggaagagcattattgtgtccaaattgagagtcctagctgtatgccataataataaatcatcgtaagttgctagatagatgtgataacgccaaatgccttcaaatactattattaatctccatcgcgagatccttcgttgtgattatgtagaaaagattacgctgcttttacaagagaatactccaagaaagcaagtgattgctccttaatataagaatcatacaataaacaaatggtgttgtagtccataaagtgtatttaatatttgatgaaagagtgtgtagacatcaaagtgataaaactaataaatttaagtttgatgcaattcgaagtcgtagatacttaattaatctctaaatcatattagttttaaaccatacagattttaatatgttgaatggattaatctttaattgtgcattggaaaatattataattcataaaaaaagaaataaagtttagacatgaataattacggactaatgaatgcaacctatatatactacgtctctcaattttgcggagaatttaggaatattatagtatttcactgaaaggacacacaagtggcaatgatgaatattttaattt

SEQ ID NO: 280 - DNA, 5761 bp, Artificial Sequence
  Synthetic polynucleotide
ataaatggtagaaatctgtgggttcaaatgttcaattgctggggatcttcgtgatcatgatgattcatacacaatctctagaaacacgtacgcaaatattaattaatcaatttcctttttatagtctcctcacaattcacatgaaacttcatactctattatccgattccatttccatcgtatctttgaatttgacatttgtttgcccaacatgtaattaactttcccttctcatcttaaagatgtaacatgatatatattataacttgtaattaacccaatatttttaactctctatttttacactcatctgacatgtatttttatttttcatttttttttcttatcacatcacctcttacgtgtacaatttttctctttttcttatttctgtcttccataatagtaattaatattcatcggtccgatatgtatacagcccaaaaaagtgtgtaaaatcatttttgtatttctaaccctctctttctcatgcaagctagcttcttctttctatttatagcccttctcccttcacccaccaacacaccacaactccaaactttttcctcttgttctcttcttcttcaacacaactagtcataatccagctcatctctctctccctctctctttgttctctctttctctttctccaaaatggctctaaactacccttttttaacctacttcatactactgctagtacccgtttgatattcactgtgggaaaaactgagcaatggaaagctccgattctaccagagcttgacattgataacatatcccacaaactccatgatgaccctgaaaccattcaaatggcttcaagggactatggccatttaacgcatgaattcccattagctgtgtttcgtccatcttctatagatgacatagtcaccttgataaaatcttcgtacaatagctttgccccttttgacatagctgcgaggggccaaggccactccactcatggacaagccatggctcgtgatgggattgtggtggacatggccagcctaagaaaacaaagaaatggggttgcgattagtgtctctaaggaccctttgatgggtcactatgctgatgttggaggggaacaactctggattgatgtgctacatgccacacttgaatatggacttgcaccagtttcttggactgattatttgtacttgaccgtgggagggacactttctaatgctggaatcagtggccagagcttccgttatggacctcaaatcagcaacgttcatgaaatggatgtcatcactggtatggagttagttgttttttttaatcaataaatgttaatattattagcttgttagttttttttgaaaaaattgaattaactttcgtttcctcttttctttctttttttaaccacacaattaatctaataactactggtattaagttagtttattttccatttttcatatataagttaggatttctaattaaaattgacatttcgtaccaccactacaaaaaaataatgtatcagtggcacaaaaaaatatattggcatcacttgtttttttagtcattaatattttgtagcatcacaaaaaatatggtgacaagttttctaaaaattacaaattaactgattcgtcagtgatgttaatgattttttagtgcgtcttggcaactaatgttttcatcttatataaaattagaaacaatagcggcaacagcacctgacattgtgtttgtgttttgcgtgtttctatcgcctaatttttgttgagaacgtgttcgtgaaacttggaaaaagagaaaattgaaattttcttgagatatctaccacttaagaaaaacaaatggctgtttccgttttgtctcttatgacatgacatggtacgtcatagatgaagttctgctaaatatatttgatatgatttcttgaacacgttttatatattcccacttcccagttagtgtggttgttgaatctaattaaaacaggaatagtctttgtctacaatatgggtgagcgatgcaaactttccaagggtttagaagttagaactatataggtccacggtcataattttatattcttgattaactttatgttggttaagtcgttcatatttggtcaattcattcatatgagaaaatactgaaatacaaacatggaaaaatgttaattactcttataattggcgcatgcatgcatctaaattatatgattttaataaatagtttttgtcatctacttgatttcaggaaaaggagagttcgtaacatgctcttcacagaagaacttggagttattccacgcggttcttggaggcttgggacaatttggagttatagcaagggcgagaattgctcttgagccagcacccaaaagggtacgtttatagagaattgactagaattttgtcttgtagcttttcctccaccaattcatatagtgacacctaatcgaattgtcatttttttttacggtgaattgtcattttgtaaatctaccaagtggtagttggcacccatatatgtatgaactatagtaccatacatttcattttatgttggtgtgttagtcatccatgatgaacacatacacaaatgaaaataggacgagttatacgtacgtaagggtttgaatcactgaatgtggatttttgaagttgaaagcatattaatcttggtttgaaaaagaaaaaaaaaatcggaagtccctcttgaagttatcatgactcttatattaagccaatagaattagaaaaactataattatgaatgatcatgttaattctttcagtgacttaaaatcttatctacaaaaagtacccttttgaaaaagaccttcacttaagtccatgcatacagtactaatcttacatacttgagagttgagacttgaagcatgaggagatttgaagtctggagaaacaagccaccacatattaattactaccgtattcttatctttatttatccttccaattttgatgggactggttgcacatacattcatacatactaacatacataaatacgtctctctctcatgtatttcattttattatattctatttcgttagtaagtttactagtataagacattattaatggtgaatttttgttggcatgcaggttaagtgggtcagactactttatagtgacttttctgcttttaccaaagaccaggaacgattaatctcaatcaatggaaggaaacaaaagaacgcattggattttctggaagggatgctgctaatgaaccaaggccccataaataattggagatcctctttcttccctctatctgaccatcccagaatagcttctttaataactgaacatagcatcctctactgtcttgaagtggctaaatattatgacgaacaaaccgagttaaatgtggacaaggtaacctcgtctagtcatatctattatatatagttagatcttgtcacatttctttgtttaaaaaataaaataaaaggcacaatcccaaaaagtcaaaagcaaatgcctagatattgtgtgttttcttggatattaattattacaccttaataacccataataatttttttatttttctttgtctctgtaggaaattgaagttttgctccaaggactagcctatatccctggatttaattatgagaaaaatgtctcgtacgttgagttcttgaatagggtccgaagtggagagttgaaacttcagtcacaaggactgtgggaagttcctcacccgtggcttaatttgtttataccaaaatctcaaatcttggattttaattcaggagtattcaaagatatagttcttaaaagaaacatctcctctggaccagtcttggtttatcccatgaatagaaacaagtaagccttgaatgcatgaatcacaatctagtgtcattataattcaggagtgtgtgatgcaatcttttaattttctgaccattcaactcaatatcaattttatttcttttttcaattaaaatgcaaaagagaataataattaataatatgaaatttaattccaggtgggacgataggatgtcagcatctataccagacgaggatgttttctacacagttgggtttttgcactcaagtgggtttgatacttggaaggcatatgatgctcaaaacagagaaattttggagttctgtagagatgctggcatcatggtcaagcaatatcttcccaaccacagcacacaagaagattggacaaaccattttggtgctaaatggatgaaattcttagaaagaaaacatcagtttgatccaagaatgattctatcacctgggcaaaaaatcttccacaaaaaattacagccagtgttttaaatattttccctaataaaaaaagtaaaaatgttttgtggtgggactacctcaattagatggctagctagggacaggtgtacatacagtgtgaccaagaccaagatggcttttgtatgctaaagtttgcattgctagctagagaaattaataaggtggggcattaaaggctgcatgagtacttttggcacctattatgctacatattaccttagatacgttaggttgacaaagtcgtactggtaggtacaagaagcacagttgtctctcacactgtctgtcacccaacttgctatatagtgtgtggagaaattcggatcatattgaagatgctgtgagttatagtcctccaatattaaatgtttaacgattctgtctttctcttatataattttgttttgcattatattactttcgcactggtgcaaacatatatatcaatgattataattaatttatacaatgacgagtataattgtacccaagttgcatgccataatatttgtcaaaaacaaaaagttgtatgccataatcaatccaggttgctagataataagatagatatgaatatgataacataaaatgctattaaagcaacaaataaacaataacacatagtccttatagggttcataattgatcgatgaacctagctagacgttgattttaggttaatttccagcgaggataaaatttattatataaagaaataactaaccaacacaaaataataaaaaattaaaaaaaaacgaagaaacttattttagagatataatttgttttagtatttgattgtaatttgagagattagctaggctctcaccaagtgagatctagagtatattcttaagaaaatatttataataaagaacccttaaacattttgcaaaacaaagggtggaattaatattaacaacaataattataatatcttgaaaattttatgaaaataatatatatatatatatatatatagagagagagagagagagagagagaaaattctcacaaacaatttttatctgttatttcaaattggtgtatgactccttagtccttagttcatttgtttgcacccagtcctgtcttaggtagttgattttatagttaggtaaattaatttctcgcactcttcgcttgattgtcatttatgggttgaactgttgaagtgattttatattttttaataaatttcacctgcaaaaaaactcaccattagcatacgccccccccccccccccccccccctctcccaaaaaaaaaaaaaaaacgaaagaagattaattagaaagaataaggtcgtgaaatgatgttacaaataaggcatatcagaatcagacgcaagggaagaataaaaacgttacaacaattcgcgcacaatgcaccccaaaaaaaaaatgacaggcacacataccttaaggaagaagaatcaacgctttca

SEQ ID NO: 281 - DNA, 5762 bp, Artificial Sequence; identical to SEQ ID NO: 228
  Synthetic polynucleotide

SEQ ID NO: 282 - DNA, 9712 bp, Artificial Sequence
  Synthetic polynucleotide
ttaaaaatatttaaagacttaattaaaaattattaaatatttcagagatctataaattaatttaacataaatgaaagtgttatcaaatatgtctagctaattgaaaaaaaaaaacttaaataaaaatttctttttacctgtcttattaggtgactaaggatataattgataaacaaaagtaattaattaattataagatctttaactttataaaaaataaataaaaaaatcttttaaaaaaaattcgacaattaaaaagaaattaacagagggagtaacaattttttacattaaaaaataaatttaaaatttgagtttaacggtcgtattatcatttagtgataaattatcgatataaattttaagataattattataaaaattaataaatttattatgataatttataattaaatcaaaatataaaattatttaacaccacgtgcataataatctaattcacaaaaaaaagaggtaatttatatagtctcttttattaccttatttttctgagtagtaataaatagacaccaagtgttaataataaagtttatcctttctcctcctatccgtctctttatttatttttcattacaaactttatcaaatctatcaatttctctctcttctatctttctctttgttctatccatacaacttaaaaatgtggttgtagtctaaaattttgcctctaattactgtctaccgcggtgtacttgacctgtacaattacctttcagatgctattataactagagaaatttagctcaagacttaaaaacaatggaccaagagatgtgctgtttccacaatgaggcacgtgtctcctcggtccagtcacgtgaagatccacgtgcctttactctgagcttgagccttagtagtttttcgtggttctctccctgtcctataaatttgagagcctgtatcttacatcctagacacacagtagtgactagctcattcattacaattcatcaccccagccaccaacccttttttcatgccaaaccacgaatttgcttctaattttcatgccaaaccctttcttctttcttttgagagagacgcaatccgctcctctatcttactggctagatcaattcctttctattaatttgcttctttctcaatttgtacatgccttcgatcttatagacatacatatatctcctaaactgcacatagagatttaaaaaaaaagaacaagttacaagtagaatttttttggcaagaatcgaagaaagtgagtgagagaaaagaatcttcatctttctgcatgttgcgtacagaatctttaaagccaaatcctgctcacgttaacccacgacgctgttccaagattttgttctcttctctggagcttcccaacattcttcctttccctcatccaccacccccactacccaataactcatcatcatcgtacgccacacacatgacatgcatgtatcttcattaattccttagcgaaaccacacgtactctagcttgtggggtagtttttaattattagttattcttatcttgttcaattcatggctgtcaagttctgttaacattcgccatatgccgtttaatagtaactgtgggattaacggtggtcccggagctgctcgatgtgggactccagggtcgtctcagcgtggacacgttggaactggaggcggcttcggtggatttcgggaggctgagtcgaggggagccttcggaggtagtgcaccctgccacggcggaggatgtggctagggtggtgaaggcggcgttcgagtctccgttcgccgtgtcagcgagggggcacgggcattcgataaacgggcaagccatgataaaagagaagaaaggagtggtgattgaaatgggaaaaagtgatagtggtgaggatggtagtagtattagagtgagtgagaaaggaatgtatgtggacgtgtggggtgggaagttgtggatagatgttttgagtgcaacattggagtatgggctggctcccatgtcttggaccgattacttgtatttgtctgtgggtggaaccctatccaacgctggaattagtggacaaaccttcaatcacggtcctcagatcaccaatgtttatgagctcgatgtcgttacaggtaatttaatatataatataatttgcattcacttttaactaatcacaaatatcattattggtatacttttttaaggtacaatttttgcattcacggttaatttttacaataatagtactatgtttaacatttgacaccttcaaagagaaaaaaaggagttctaccattataaatgattctaaagatggatttatattttcgaaaattaatgtttattatatacatttttaaataatttaaatttgttggtgttattgttgccaaatttgattgttttaccgtaagaaatgatgcttgtgcatgctaataactagttgttcttgttccccaagaggaaaagttaattttcactaattaaacagaggtgtcccactggtttgtcatggtgctgagtacaaacgaatctcgtttatctttagcgtggttaatctcgttgatatcataatgtgtactggtgtgtaacaggaaagggtgagctggtgacatgttcagaagatcgtaactcggagttgttccatgctgttctaggtggtcttggacaatttggaatcatcacaagggctagaattgctctcgaaccagctcctcacagagtgtgtatctctcccacgtactttatctttctttgtctctttttcttactcacacatatacagtacccaattccctctttcctaattgtatgactctcttttcgtactagctcgtgacctcgcacataatatgctaacatttcatgtaataattgaagataaagttataaaaatgaataatattatctgttttcataatgcatacatatacttcatttttattttttagaaacaactcaatgtaaataaaatttaaagtgtaaatattatttctttttttccatcatggaaaaaaaaagtcggttgaacatgatttccatgagatgataggaggggcacacacgatgcgtcttttcttggaaatctttcttcacatcagcgacaaaacctaaaaaaagggtcgttttcgaagggatggtttgggtactcttctaacaatataaagctggaataattatcgtttgcgtgtcgcctgcctgggacattctctgttttaattcatttctcttaacgaactaatatcactatcgattaagggaactgatatcaatgagctataacaatagaatattctcgtctaattaatattattagggtttaatttctatttactgtaaattaatattactataagaaattttacattttcaatcaatcatacatcatcgtggtggtataacttttaaagtgataattactataaaaaggaacatatacttctcatacatgtttatttataattgagagattagataaaatttgtttacacgttcaatagatatattattttctccaataaaattatattagagttagatatatgataaatatttaagtgcaggttcggtggatacgagtactgtattcgaattttgcaaggttttgtaaggaccaggagtatctgatatctctgcatgggaaagcagcaagggagagattcgactatgtggagggtttcgtgatagttgatgaagggctgatcaataattggaggtcttcgttcttttcagctagtaacccagttaaaatcacttccctcaacgctgacggaggtgttttgtactgcttggagattaccaaaaattacgaccaaggaaacgcagattctgttgatgaggtacgtacacacccaatcccacgtacattttctcttctttgtcagtgccttcacttatatataatattattgactgttcatacacttagtgcgctgtcacaataaaatatattcatttaactttcattagtttaattatgtgaagttaccttatttcgtttactaataacgtgttcatatcttatttattgcgtactccacttcgtgtacacattataattgtcattttttatcattttacaccaagaaaataataaataaataagactaataataattttataaaattaatattttattattattaattcatttataaattttgttatttataattaatatgataagcgatataattaaaaaataataattaatgttacatttaaaaattaaaatgataattattttgaaatatttttttctcttgtatgacagttactttaatgttgaagaaaatttagatagaattaaacaaaatgattggacaaaataattaatatattaaagttaaaattaaattatttcagtattatttaagtttgatatttaataaaaataattttttattcgattttacttattttttgattgaattctagattagttgagattcaatttttttaatgagttggagggataggaaaaaaatagttagatagaattaattcttgaaagagtgaaaaaaaaatacattgaagcttttttttattgaaacgtgtaagaatcgagattctaacaaaaaataaaacagggcttaagtagttaagtttttaccaaaatcactccacctagctagctaatgttgcctgtttaatttactttatgtatttttatttttttttcggttacatccatttgtttaaaataattgtttctcaaatatgctacttgatgtccatgttgttcaaattctaaactctagaaaagacatgaaatataagtatgtgtcagaataattaattaagtcttcgggctttttcgtccagtttttgttagttggtcaacacatttatgcttcagagattctataggatttatagggagcaaaatataaaattaacaggcaaacataaaaggacaaaattaatggcgttgatttgaacatcaattaaaaagtaacattgatattcataacaaattaacagacaaatgtgaaagaacaaaaatagcattattcaataccagttgtttttaccacattaaatttgaacgtttagttttgagtcatctgtcctttctctctttatcgttctacccttgagaagatcaacggaagaaatatgtcaattattctgacgaatactctcatatgattatgcgattaatgtcaagattttcttcgttcacaaattcatgcttactttaataattcagtatctgtctgttttatgtttgaagtctgatttaatattgttaatggtatctttaagtaattggtcaaacaattcaattaacaagaaaaatgatatacgctgtccagaggtaatcacattttatttaatttcataatttattgaattaaaaccttggttcttccttcatcgctgtcctcgtatatgattattctctgtacccaaacattgaccagtctctagttgtagaacagaatgcaataaaacatacaaaagaaaacatgtggaagatcttgtgcaatctatcatctcgattcaatcgcaagattgaatgcaacctttacaatagttaattttcactgtttaaaaatgccggcagtccaccagaatattctctcacttgtttttaacttctcttaattaattcttgtcaaagctatatataactgctcacaatagtgggtctcatatcccgacaaaagcaccggctaccttagctagcagctttcctttttcatgcataactatttaatttaagacctagagaggaaaaaagagataaatatagtttaaataagtgatatgatgttatagaaaaataaacataaaatatgttactagagtatttcatttatatatatatatatatactccacttttataaatatatttaaataaatagttatttgtattttgatctactagaatgacgtatgagagatttttttttaatctttaatttttgttattaagtacttatgtttttaaagttaaacaaagttagtctttctattaatattctttacaaaacgtcaaaacctttaagttcattttctgtttaaaatatttataaattatatctattacattatttaaatactttttattcgaagcataccaaccgaaattaaacatcaaaagacattttcttagatttctctttgtacgtttttatggtatgcaggaaatacaagctctattgaaaaagttaaattttataccaacatcggttttcacaacggacttgccttacgtggattttctggatcgtgtacataaggcagagctgaagcttagatccaagggtttatgggatgtacctcatccgtggctcaacctttttgttccaaaatcaaggataggggacttcgacaagggtgtgttcaagggcattcttggaaataagacaagtggacctatcctcatataccctatgaacaaaaacaagtaagtttataaatatatatttccgcatgcatatccatttgttatactatcatattcatccatgtcctagtcatatatatgtagaataaaaccactgcatgtttgcaggcatgcacatatctcctcatatataaaccacatgtctgctgctgatagcctcatatcgactgtcagtgtttagggaagaagaaaagaaaagaaaaagttcaaatgagtaatgaaatagagtatgaagttttgtgatcatatatgaaagagaaaaacctgcaacataatatatattttctacaacgaatattcccaataattatggaactagatgaaaatgtgtgaagattctccacgattgatggacagatagtactattgtcggaattaatggattagggaataaacagaatctagacgtttacattaatcctaataatagatggctgaatctgtttgtttctactttcattgtgtgtattaattaatccaggtcctcgataattcttgaattaaagaagattctgtttgataaatttgtctacacttaattaaacactgacaaaaaaaactaaaatgaattaatttatttttataaattaaaatttacatctcaataaaatattagctatagataacttaaattaagaatgcttaatccaattaagtgaaaataaaaaatatgaaaagaacaagaagcacagtgaggtgcatgtagtggaaagacatggaagacacacgagggttgtattgtagccaacatagcagatgaaaatctgcatcaaagccagctaggaagtgccacgtttattatttcttgaccagaagcaaacaaaatggatggccatgatcatccaactggagagattctggtgtcagaagatcttccatagggacccactcctcgaatggtagggatgtctcctctccactcctcaccttttatactaacctagttccatagacaccgccatatgcatcaacttccaggtcaatatcaatataatatgcacaaataaacaaataaaaaccataataattgcacttagttatgttttttttttttcattttaaaaataccaaaaattaatgataatgatatcacaaataaaaataaaaatgcatgtttgttagagggtatataatataagaaagacaacgcttgtccaaagcatttatatatagagagagagaataagataaaaaattaaatgaattctatgtatcttgccataggtttctgactgataagtcgatggattattaatgtttttgaattagaccacgaattagaaatacttaaaaaagttctattgttatttcaacagagtagtagtaagtaaagtaaatggtttcaagtgtgcagtatagatgaatagaaaaattcaaaagatgattttgggcgatggtgatgtgtaggtgggaccagcgaagctcggtggtgacaccagaagaggatgtgttttacctggtggcatttctaagatcggcattggatactgagacgctggagtacctgactaatcagaaccgtcaaattctgaaattctgccatgatatagagatcaaggtaaaacaatacctgccccattacactacgcagcaggagtggatggaccactttggtgataagtggacccagttcaatgctaggaagatgcaattcgatccccgccgaatcttagccacaggccagcaaatttttcagtttcatccctcactcaccctcaatatgtagaacaaacatgcaaaatggataaataatcttgggttcatgttgagtagcaagtgctgtattattgtaattaggaaatacaaggaggatcatggcaaaaaaagaattagaaggatgtagttgtagtgcactagtgaaggatcaagagttgttgaggtgttgttatctgagggtaataaaattgatgatggagttggatttttgttatgtaatggggtcttgtagcaaattaagtaaggaacccaataaggattaggcccaaagaatataaggagtggtggggcccgctttggaggaggaaaagggcaatgcgcaagtgcacatgagcaccgcccgtctggtttggctgtctcgtttttcaatatagatatcttttattacccatccaaattcctcgtacatataattcttctagatgtattagtctgtatgtttatttcaaatggaaacatttaatcagtgactccttataaaacataatcaacggcatttatgaataaagttaataagttaagagggaaaggaaagaggagaggaaaatgttcaaatgaatcaaatttctcccattaacatttttaataaaattaatatttatcgataaaaaaaatatcaacaagttaagaaaataataataatagacatgtattgctaatataaaagtttccgtacacaattaattaattagaaactatcttaaatatcacttttaacaaagtaataatataaatcaataacataactttttttttatcactataatattaatgtgacatatttgtctattttgagaggttggaaacttggagacgagctctagaaacacatgactttcgcctaaacagaagcaaatcggagtatatggaatgtaagttcaacaaaagtaagagggtatctaactcagatgtgaaaatagaagaccatattatccctcaagtcacacagtttaaatatcttgggtctgtaatacaggatgatggagaaattgaaggggatgtgaatcatcgcattcaagcaggatggatgaaatggagaaaagcatcaggggtgttatgtgatgcaaaggtaccgatcaagctaaagggaaagttttatcggactgcggtaagaccggcgattttgtacggaacagaatgttgggcggtcaagagccaacatgagactaaagtaggtgtagcggagatgaggatgttgcggtggatgtgtggtaagactcgacaggataaaattagaaacggagctattagagagagggttggagtagcgcctattgtagagaagatggtggaaaatagacttaggtgatttgggcatgtagagagaagaccggtagactctgtagtgaggagagtagaccagatggagagaaggcaaacaattcgagacagaggaagacccaaaaaaactataagagaagttatcaagaaggatttcgaacttaatgatttggatagaagtatggtacttgatagaacattatggcagaagttgatccatgtagccgaccccacctagtgggataaggtgttgttgttgttgttgtatttgtctattttattaatgattaatttctgttggagaacttaatt

SEQ ID NO: 283 - DNA, 5762 bp, Artificial Sequence; identical to SEQ ID NO: 228
  Synthetic polynucleotide

SEQ ID NO: 284 - DNA, 5756 bp, Artificial Sequence
  Synthetic polynucleotide
ataaatggtagaaatctgtgggttcaaatgttcaattgctggggatcttcgtgatcatgatgattcatacacaatctctagaaacacgtacgcaaatattaattaatcaatttcctttttatagtctcctcacaattcacatgaaacttcatactctattatccgattccatttccatcgtatctttgaatttgacatttgtttgcccaacatgtaattaactttcccttctcatcttaaagatgtaacatgatatatattataacttgtaattaacccaatatttttaactctctatttttacactcatctgacatgtatttttatttttcatttttttttcttatcacatcacctcttacgtgtacaatttttctctttttcttatttctgtcttccataatagtaattaatattcatcggtccgatatgtatacagcccaaaaaagtgtgtaaaatcatttttgtatttctaaccctctctttctcatgcaagctagcttcttctttctatttatagcccttctcccttcacccaccaacacaccacaactccaaactttttcctcttgttctcttcttcttcaacacaactagtcataatccagctcatctctctctccctctctctttgttctctctttctctttctccaaaatggctctaaactacccttttttaacctacttcatactactgctccgtttgatattcactgtgggaaaaactgagcaatggaaagctccgattctaccagagcttgacattgataacatatcccacaaactccatgatgaccctgaaaccattcaaatggcttcaagggactatggccatttaacgcatgaattcccattagctgtgtttcgtccatcttctatagatgacatagtcaccttgataaaatcttcgtacaatagctttgccccttttgacatagctgcgaggggccaaggccactccactcatggacaagccatggctcgtgatgggattgtggtggacatggccagcctaagaaaacaaagaaatggggttgcgattagtgtctctaaggaccctttgatgggtcactatgctgatgttggaggggaacaactctggattgatgtgctacatgccacacttgaatatggacttgcaccagtttcttggactgattatttgtacttgaccgtgggagggacactttctaatgctggaatcagtggccagagcttccgttatggacctcaaatcagcaacgttcatgaaatggatgtcatcactggtatggagttagttgttttttttaatcaataaatgttaatattattagcttgttagttttttttgaaaaaattgaattaactttcgtttcctcttttctttctttttttaaccacacaattaatctaataactactggtattaagttagtttattttccatttttcatatataagttaggatttctaattaaaattgacatttcgtaccaccactacaaaaaaataatgtatcagtggcacaaaaaaatatattggcatcacttgtttttttagtcattaatattttgtagcatcacaaaaaatatggtgacaagttttctaaaaattacaaattaactgattcgtcagtgatgttaatgattttttagtgcgtcttggcaactaatgttttcatcttatataaaattagaaacaatagcggcaacagcacctgacattgtgtttgtgttttgcgtgtttctatcgcctaatttttgttgagaacgtgttcgtgaaacttggaaaaagagaaaattgaaattttcttgagatatctaccacttaagaaaaacaaatggctgtttccgttttgtctcttatgacatgacatggtacgtcatagatgaagttctgctaaatatatttgatatgatttcttgaacacgttttatatattcccacttcccagttagtgtggttgttgaatctaattaaaacaggaatagtctttgtctacaatatgggtgagcgatgcaaactttccaagggtttagaagttagaactatataggtccacggtcataattttatattcttgattaactttatgttggttaagtcgttcatatttggtcaattcattcatatgagaaaatactgaaatacaaacatggaaaaatgttaattactcttataattggcgcatgcatgcatctaaattatatgattttaataaatagtttttgtcatctacttgatttcaggaaaaggagagttcgtaacatgctcttcacagaagaacttggagttattccacgcggttcttggaggcttgggacaatttggagttatagcaagggcgagaattgctcttgagccagcacccaaaagggtacgtttatagagaattgactagaattttgtcttgtagcttttcctccaccaattcatatagtgacacctaatcgaattgtcatttttttttacggtgaattgtcattttgtaaatctaccaagtggtagttggcacccatatatgtatgaactatagtaccatacatttcattttatgttggtgtgttagtcatccatgatgaacacatacacaaatgaaaataggacgagttatacgtacgtaagggtttgaatcactgaatgtggatttttgaagttgaaagcatattaatcttggtttgaaaaagaaaaaaaaaatcggaagtccctcttgaagttatcatgactcttatattaagccaatagaattagaaaaactataattatgaatgatcatgttaattctttcagtgacttaaaatcttatctacaaaaagtacccttttgaaaaagaccttcacttaagtccatgcatacagtactaatcttacatacttgagagttgagacttgaagcatgaggagatttgaagtctggagaaacaagccaccacatattaattactaccgtattcttatctttatttatccttccaattttgatgggactggttgcacatacattcatacatactaacatacataaatacgtctctctctcatgtatttcattttattatattctatttcgttagtaagtttactagtataagacattattaatggtgaatttttgttggcatgcaggttaagtgggtcagactactttatagtgacttttctgcttttaccaaagaccaggaacgattaatctcaatcaatggaaggaaacaaaagaacgcattggattttctggaagggatgctgctaatgaaccaaggccccataaataattggagatcctctttcttccctctatctgaccatcccagaatagcttctttaataactgaacatagcatcctctactgtcttgaagtggctaaatattatgacgaacaaaccgagttaaatgtggacaaggtaacctcgtctagtcatatctattatatatagttagatcttgtcacatttctttgtttaaaaaataaaataaaaggcacaatcccaaaaagtcaaaagcaaatgcctagatattgtgtgttttcttggatattaattattacaccttaataacccataataatttttttatttttctttgtctctgtaggaaattgaagttttgctccaaggactagcctatatccctggatttaattatgagaaaaatgtctcgtacgttgagttcttgaatagggtccgaagtggagagttgaaacttcagtcacaaggactgtgggaagttcctcacccgtggcttaatttgtttataccaaaatctcaaatcttggattttaattcaggagtattcaaagatatagttcttaaaagaaacatctcctctggaccagtcttggtttatcccatgaatagaaacaagtaagccttgaatgcatgaatcacaatctagtgtcattataattcaggagtgtgtgatgcaatcttttaattttctgaccattcaactcaatatcaattttatttcttttttcaattaaaatgcaaaagagaataataattaataatatgaaatttaattccaggtgggacgataggatgtcagcatctataccagacgaggatgttttctacacagttgggtttttgcactcaagtgggtttgatacttggaaggcatatgatgctcaaaacagagaaattttggagttctgtagagatgctggcatcatggtcaagcaatatcttcccaaccacagcacacaagaagattggacaaaccattttggtgctaaatggatgaaattcttagaaagaaaacatcagtttgatccaagaatgattctatcacctgggcaaaaaatcttccacaaaaaattacagccagtgttttaaatattttccctaataaaaaaagtaaaaatgttttgtggtgggactacctcaattagatggctagctagggacaggtgtacatacagtgtgaccaagaccaagatggcttttgtatgctaaagtttgcattgctagctagagaaattaataaggtggggcattaaaggctgcatgagtacttttggcacctattatgctacatattaccttagatacgttaggttgacaaagtcgtactggtaggtacaagaagcacagttgtctctcacactgtctgtcacccaacttgctatatagtgtgtggagaaattcggatcatattgaagatgctgtgagttatagtcctccaatattaaatgtttaacgattctgtctttctcttatataattttgttttgcattatattactttcgcactggtgcaaacatatatatcaatgattataattaatttatacaatgacgagtataattgtacccaagttgcatgccataatatttgtcaaaaacaaaaagttgtatgccataatcaatccaggttgctagataataagatagatatgaatatgataacataaaatgctattaaagcaacaaataaacaataacacatagtccttatagggttcataattgatcgatgaacctagctagacgttgattttaggttaatttccagcgaggataaaatttattatataaagaaataactaaccaacacaaaataataaaaaattaaaaaaaaacgaagaaacttattttagagatataatttgttttagtatttgattgtaatttgagagattagctaggctctcaccaagtgagatctagagtatattcttaagaaaatatttataataaagaacccttaaacattttgcaaaacaaagggtggaattaatattaacaacaataattataatatcttgaaaattttatgaaaataatatatatatatatatatatatagagagagagagagagagagagagaaaattctcacaaacaatttttatctgttatttcaaattggtgtatgactccttagtccttagttcatttgtttgcacccagtcctgtcttaggtagttgattttatagttaggtaaattaatttctcgcactcttcgcttgattgtcatttatgggttgaactgttgaagtgattttatattttttaataaatttcacctgcaaaaaaactcaccattagcatacgccccccccccccccccccccccctctcccaaaaaaaaaaaaaaaacgaaagaagattaattagaaagaataaggtcgtgaaatgatgttacaaataaggcatatcagaatcagacgcaagggaagaataaaaacgttacaacaattcgcgcacaatgcaccccaaaaaaaaaatgacaggcacacataccttaaggaagaagaatcaacgctttca
